(19) United States
(12) Patent Application Publication
(10) Pub. No.: US 2015/0275275 A1
(43) Pub. Date: Oct. 1, 2015

(54) PROGNOSTIC OF DIET IMPACT ON OBESITY-RELATED CO-MORBIDITIES

(71) Applicants: INSTITUT NATIONAL DE LA RECHERCHE AGRONOMIQUE, Paris (FR); UNIVERSITE PIERRE ET MARIE CURIE (PARIS 6), Paris (FR); INSTITUT DE RECHERCHE POUR LE DEVELOPPEMENT (IRD), MARSEILLE (FR)

(72) Inventors: Stanislav Ehrlich, Orsay (FR); Joel Dore, Vitry Sur Seine (FR); Emmanuelle Le Chatelier, Magny Les Hameaux (FR); Karine Clement, Paris (FR); Jean-Daniel Zucker, Paris (FR)

(21) Appl. No.: 14/435,736

(22) PCT Filed: Oct. 17, 2013
(86) PCT No.: PCT/EP2013/071764

§ 371 Date: Apr. 14, 2015

(30) Foreign Application Priority Data
Oct. 17, 2012 (EP) 12306285.3

(51) Int. Cl. C12Q 1/68

(52) U.S. Cl. CPC C12Q 1/689; C12Q 2600/158; C12Q 2600/16

(57) ABSTRACT

The present invention relates to a method for determining whether an overweight subject has a reduced gut bacterial diversity. The said method comprises detecting the presence or absence in a gut DNA sample of at least one gene of at least one bacterial species of Table 1 or Table 2, respectively.

[0001] The present invention relates to methods to determine the risk of obesity-related co-morbidities in overweight subjects based on the gut bacterial microbiome, and methods to increase bacterial richness in individuals in need thereof, particularly in overweight individuals.

[0002] Overweight and obesity are defined as abnormal or excessive fat accumulation that presents a risk to health. A crude population measure of obesity is the body mass index (BMI), a person's weight (in kilograms) divided by the square of his or her height (in metres). A person with a BMI equal to or more than 25 is considered overweight. A person with a BMI of 30 or more is generally considered obese.

[0003] Overweight and obesity are major risk factors for a number of chronic diseases, or so called obesity-related co-morbidities, including diabetes, cardiovascular diseases and cancer. A substantial literature supports that overweight and obesity are major causes of co-morbidities which can lead to further morbidity and mortality. In a recent review, 18 co-morbidities were shown to be statistically correlated with overweight and obesity: cancer (kidney, colorectal, prostate, ovarian, uterine/endometrial, esophageal, pancreatic, and post-menopausal breast), type II diabetes, cardiovascular disease risk (hypertension, coronary artery disease, congestive heart failure, pulmonary embolism, stroke), gallbladder disease, chronic back pain, osteoarthritis and asthma (Guh D. et al., BMC Public Health.; 9: 88; 2009).

[0004] This raises serious concern as regards to public health, both from the point of view of the patients, but also from an economic standpoint. Indeed, the above-mentioned diseases most often require extensive medical treatments, or, in the case of chronic diseases, continuous monitoring.

[0005] While it has been long recognized that the most efficient strategy to prevent those diseases is weight loss, many different weight loss strategies can be considered, depending on the patient. While classical low calorie diets have been recommended by practitioners for a long time, drastic approaches such as surgery can be necessary in some cases. There is still on-going discussion as to what kind of weight loss strategy is more efficient to alleviate co-morbidity risks. One of the possibilities that seem to surface from different studies is that specific weight loss strategies may need to be tailored to the overweight or obese individual, depending on several factors such as genetic background and hormonal profile. Yet, probably because of the diversity of cases, no clear markers have been identified that could serve as decision-making help for practitioners.

[0006] Recent research however points toward another aspect of the issue at hand, which is that the human microbiota plays a crucial role in both the predispositions of different diseases (Clemente et al., Cell., 148(6):1258-70, 2012).

[0007] The human microbiota comprises thousands of bacterial species, among which commensal, beneficial or pathogen bacteria. Humans host microbiota in multiple locations such as skin, lung, vagina, mouth, and gut. Those microbiota are different in their location and in their bacterial composition. The gut microbiota is the largest in its composition. It is generally considered that it comprises thousands of bacterial species, weighs about 1.5 kg and constitutes a rich gene repertoire on its own, also called gut microbiome, 100 times larger than the human nuclear genome.

[0008] The gut microbiota has been shown to play a role in the development of metabolic disorders such as obesity, metabolic syndrome, and diabetes. While normbiosis, qualifying the normal state of the microbiota, seems to guaranty homeostasis, disbiosis, which is the distortion from normbiosis, correlates with a long list of diseases.

[0009] Recent studies show that the human gut microbiota may be altered in obese relative to lean individuals, even if somewhat inconsistent changes have been reported. An increase in the phylum Firmicutes and a decrease of Bacteroidetes associated with obesity was observed in some, but not all studies, with the inverse also reported. An increase of Actinobacteria in obese was reported as well. Mouse gut microbiota obesity-related alterations are characterized by changes in the Firmicutes to Bacteroidetes ratio, increased in the obese animals. These changes are likely not a mere consequence of obesity, since the obese phenotype can be transmitted by gut microbiota transplantation in mice, indicating that gut microbial populations may have an active role in obesity pathogenesis, and thus probably with the associated co-morbidities.

[0010] However, not all of the bacterial species of the gut microbiota have been identified and sequenced, mostly because most of them cannot be cultured. In addition, most bacteria are only present at a low copy number in the gut microbiota, which makes them difficult to detect (Hamady and Knight, Genome Res., 19: 1141-1152, 2009). Therefore, most sequences in the gut bacterial DNA are not yet taxonomically assigned, which restrains the use as biomarkers to taxonomically known species and genes.

[0011] There is thus still a need for markers that would allow the determination of the risk for an overweight subject to develop obesity-related co-morbidities, and moreover to differentiate between overweight subjects in order to adapt the weight-loss strategy to each individual.

### FIGURE LEGEND

[0012] FIG. 1. Gut microbial composition of LGC (n=18) and HGC (n=27) subjects.

a) Gene count distribution in all individuals (red line) or enterotypes (black lines) at baseline, upon downsizing the data to 7 millions of uniquely matched reads. b) Presence and frequency of 25 tracer genes for 18 bacterial species. Rows correspond to genes and the relative frequency of each gene is indicated by color, increasing from light grey to intense grey; white denotes that a gene has not been detected. Columns correspond to individuals, who are ordered by increasing gene number for the 3 time points of the study. Values on the right side of the figure give the Mann-Whitney probability (q: adjusted by Benjamini-Hochberg method) that a species is differentially abundant among the low and high gene individuals; the abundance of a species in an individual was computed as the mean of frequencies of the tracer genes. F. prau & R. inul stand for F. prausnitzii and R. inulinivorans, respectively. c) AUC values obtained for the best combinations of 1 to 15 species in a ROC analysis of 45 individuals of our cohort (red); Inset: AUC for the best combination of 6 species. AUC French and AUC Danes refer to French (Micro-obese) and the Danish (MetaHIT) cohorts, respectively.

[0013] FIG. 2. Differences between LGC (n=18) and HGC (n=27) subjects in bioclinical variables.

White and black bars refer to LGC & HGC groups, respectively; standard errors of the mean are indicated. 0 wk: baseline, 6 wks: end of the energy restriction period, and 12 wks: end of stabilization period. #: p-value<0.1, *: p-value<0.05, **: p-value<0.01 by Maim-Whitney tests. “Disse index” is calculated by combining lipid and insulin values (see supplementary material).

### DESCRIPTION

[0014] The inventors have established that the clinical traits linked to obesity-related co-morbidities are significantly correlated to a reduced gut bacterial diversity in overweight subjects. They moreover designed a method to accurately determine whether an overweight subject has a reduced bacterial diversity. It is thereby possible to determine with a high sensitivity whether an overweight subject is at risk to develop obesity-related co-morbidities.

[0015] The present invention is directed to a method for determining whether an overweight subject has a reduced gut bacterial diversity is at risk to develop obesity-related co-morbidities. Such a determination is particularly useful to assess if an overweight subject is at risk of developing obesity-related co-morbidities. The inventors have shown that it is possible to discriminate between overweight subjects having reduced gut bacterial diversity and those having normal gut bacterial diversity by simply assessing the presence of a small number of bacterial species in the gut

[0016] The inventors have found a set of specific bacterial species, which presence or absence in the bacterial DNA of the faeces of an overweight subject significantly correlates with reduced gut bacterial diversity. These species are not limited to the ones which have already been known from prior art.

[0017] By “reduced gut bacterial diversity”, it is herein referred to a gut microbiota in which the number of bacterial species is reduced compared to the average normal gut microbiota.

[0018] For example, the comparison between a test microbiota and a normal gut microbiota can be achieved by the genotyping of sequences obtained from the biological samples for example with massively parallel DNA sequencing. In that case, a subject with reduced bacterial diversity can have a microbiome comprising less than 480 000 bacterial gene counts, wherein said counts were obtained by sequencing gut microbial DNA obtained from a sample of 200 mg of faeces with Illumina-based high throughput sequencing, mapping the sequences obtained onto a reference set of bacterial genome (as described in Arumugam et al., Nature., 473(7346):174-80, 2011), removing human contamination, discarding reads mapping at multiple positions, and based on the total amount of remaining matched reads.

[0019] According to the invention, a subject has either a reduced gut bacterial diversity, or a normal bacterial diversity. The skilled person would then understand easily that when the method of the invention does not determine that the overweight subject has a reduced gut bacterial diversity, said subject obviously has a normal gut bacterial diversity. By “normal gut bacterial diversity”, it is herein referred to a gut microbiota in which the number of bacterial species is around the number found in the average normal gut microbiota, that is to say between 10% inferior and 10% superior to the number of bacterial species found in the average normal gut microbiota.

[0020] By “microbiota”, it is herein referred to microflora and microfauna in an ecosystem such as intestines, mouth, vagina, or lungs. In microbiology, flora (plural: floras or floræ) refers to the collective bacteria and other microorganisms in an ecosystem (e.g., some part of the body of an animal host). The “gut microbiota” consists of all the bacterial species constituting the microbiota present in the gut of an individual.

[0021] A bacterial species according to the invention encompasses not only known bacterial species, but also species which have not yet been taxonomically described. Indeed, whether they already have been taxonomically described or not, bacterial species can be characterized by their genome. For example, methods for characterizing bacteria using genetic information have been described in Vandamme et al. (Microbiol. Rev. 1996, 60(2):407).

[0022] It will be obvious to the person skilled in the art that the genes of a bacterial species are physically linked as a unit rather than being independently distributed between individuals, i.e. the genome of said bacterial species comprises gene sequences which are always present or absent together among individuals. Bacterial species can therefore be defined by parts of their genome, and sequencing the entire genome of bacterial species is not necessary for proper bacterial species identification.

[0023] For instance, a method for the identification of bacterial species in a microbial composition, based on bacterial DNA sequencing and using marker genes as taxonomic references has been described in Liu et al. (BMC genomics, 12(S2):S4, 2011). The person skilled in the art may further refer to Arumugam et al. (Nature, 473(7346):174-80, 2011) or Qin et al. (Nature, 490(7418):55-60, 2012) for detailed methods for the identification of bacterial species based on bacterial DNA sequencing.

[0024] According to the present invention a “bacterial species” is a group of bacterial genes from the gut microbiome, which abundance level varies in the same proportion among different individual samples. In other words, a bacterial species according to the invention is a cluster of bacterial gene sequences which abundance levels in samples from distinct subjects are statistically linked rather than being randomly distributed. It will be immediately apparent to the skilled person that such a cluster thus corresponds to a bacterial species.

[0025] Genes of the microbiome can be ascribed to a bacterial species by several statistical methods known to the person skilled in the art. Preferably, a statistical method for testing covariance is used for testing whether two genes belong to the same cluster. To this end, the skilled person may use non-parametrical measures of statistical dependence, such as the Spearman's rank correlation coefficient for example. Most preferably, a bacterial species according to the invention is a cluster that comprises gut bacterial genes and that is determined by the method used in Qin et al. (Nature, 490(7418): 55-60, 2012) for identifying metagenomic linkage groups.

[0026] By “subject”, it is herein referred to a vertebrate, preferably a mammal, and most preferably a human. By “overweight subject”, it is herein referred to a human being having a body mass index superior to 25 kg/m². The Body mass index is defined as the individual's body mass divided by the square of his or her height. The formulae universally used in medicine produce a unit of measure of kg/m2.

[0027] There are several ways to obtain samples of the said subject's gut microbial DNA (Sokol et al., Inflamm. Bowel Dis., 14(6): 858-867, 2008). For example, it is possible to prepare mucosal specimens, or biopsies, obtained by coloscopy. However, coloscopy is an invasive procedure which is ill-defined in terms of collection procedure from study to study. Likewise, it is possible to obtain biopies through surgery. However, even more than coloscopy, surgery is an invasive procedure, which effects on the microbial population are not known. Preferred is the fecal analysis, a procedure which has been reliably been used in the art (Bullock et al., Curr Issues Intest Microbiol.; 5(2): 59-64, 2004; Manichanh et al., Gut, 55: 205-211, 2006; Bakir et al., Int J Syst Evol Microbiol, 56(5): 931-935, 2006; Manichanh et al., Nucl. Acids Res., 36(16): 5180-5188, 2008; Sokol et al., Inflamm. Bowel Dis., 14(6): 858-867, 2008). An example of this procedure is described in the Methods section of the Experimental Examples. Feces contain about 1011 bacterial cells per gram (wet weight) and bacterial cells comprise about 50% of fecal mass. The microbiota of the feces represents primarily the microbiology of the distal large bowel. It is thus possible to isolate and analyze large quantities of microbial DNA from the feces of an individual. By “gut microbial DNA”, it is herein understood the DNA from any of the resident bacterial communities of the human gut. The term “gut microbial DNA” encompasses both coding and non-coding sequences; it is in particular not restricted to complete genes, but also comprises fragments of coding sequences. Fecal analysis is thus a non-invasive procedure, which yields consistent and directly-comparable results from patient to patient.

[0028] As explained above, “gut microbiome”, as used herein, refers to the set of bacterial genes from the species constituting the microbiota present in the gut of said subject. The sequences of the microbiome of the invention comprise at least gene sequences from the bacterial gene catalogue published by Qin et al. (Nature, 464: 59-65, 2010). The gene sequences from the catalogue are available from the EMBL (http:///www.bork.embl.de/˜arumugam/Qin_et_al_{—}2010/) and BGI (http://gutmeta.genomics.org.cn) websites.

[0029] These species are not limited to the ones which have already been known from prior art. Importantly, these specific bacterial species show a high correlation coefficient with reduced gut bacterial diversity. It is thus possible to determine whether a subject has reduced gut bacterial diversity with a high sensitivity. The sensitivity of a method is the proportion of actual positives which are correctly identified as such, and can be estimated by the area under the ROC (Receiver Operating Characteristic) curve, also called AUC. A receiver operating characteristic (ROC), or simply ROC curve, is a graphical plot which illustrates the performance of a binary classifier system as its discrimination threshold is varied. It is created by plotting the fraction of true positives out of the positives (TPR=true positive rate) vs. the fraction of false positives out of the negatives (FPR=false positive rate), at various threshold settings. TPR is also known as sensitivity, and FPR is one minus the specificity or true negative rate. Area Under the Curve (AUC) is a measure of a classifier/test performance across all possible values of the thresholds. The higher the AUC, the better the performance of the test.

[0030] The inventors have found that it is not necessary to determine the presence or the absence of every single of the said bacterial species in order to assess the diversity of the gut bacterial population. Rather, said diversity can be evaluated with a high degree of confidence and accuracy by examining a very small subset of bacterial species. As shown in the experimental part, a very small number of species is a good marker of the said diversity. Indeed, even when the presence or absence of only one bacterial species is assessed, the method of the invention enables the detection of reduced bacterial diversity in a subject with an AUC of at least 0.74, and can be up to 0.89, depending of the bacterial species chosen.

[0031] In comparison, a random method usually has an AUC of 0.5. Moreover, when inflammatory bowel disease, one of the pathologies associated with reduced bacterial diversity, is assessed by 16S rRNA sequencing of fecal samples, the AUC is of only 0.83 (Papa et al; PLoS One. 2012; 7(6):e39242. 2012).

[0032] According to a first embodiment of the invention, the method for determining whether an overweight subject has a reduced gut bacterial diversity comprises a step of detecting from a gut microbial DNA sample obtained from said subject whether at least one gene from at least one bacterial species from Table 1 is absent in said sample.

[0033] The bacterial species of the invention are chosen from the list consisting in the bacterial species of Table 1. More precisely, the bacterial species of the invention are chosen from the list consisting in MOHL-1, MOHL-2, MOHL-3, MOHL-4, MOHL-5, MOHL-6, MOHL-7, MOHL-8, MOHL-9, MOHL-10, MOHL-11, MOHL-12, MOHL-13, MOHL-14, MOHL-15, MOHL-16, MOHL-17, MOHL-18.

[0034] By “at least one bacterial species”, it is herein meant that the absence of one unique species or of more than one species is assessed. In a preferred embodiment, the method of the invention includes the detection of the absence of 1, 2, 2, 4, or 5 bacterial species. Even more preferably, the said method includes the detection of the absence of more than 5 bacterial species. Most preferably, the said method includes the detection of the absence of 18 bacterial species.

[0035] Most intestinal commensals cannot be cultured. Genomic strategies have been developed to overcome this limitation (Hamady and Knight, Genome Res, 19: 1141-1152, 2009). These strategies have allowed the definition of the microbiome as the collection of the genes comprised in the genomes of the microbiota (Turnbaugh et al., Nature, 449: 804-8010, 2007; Hamady and Knight, Genome Res., 19: 1141-1152, 2009). The existence of a small number of species shared by all individuals constituting the human intestinal microbiota phylogenetic core has been demonstrated (Tap et al., Environ Microbiol., 11(10): 2574-2584, 2009). Recently, a metagenomic analysis has led to the identification of an extensive catalogue of 3.3 million non-redundant microbial genes of the human gut, corresponding to 576.7 gigabases of sequence (Qin et al., Nature, 464(7285): 59-65, 2010).

[0036] It will be immediately apparent to the person of skills in the art that the presence of a bacterial species can be easily determined by detecting a nucleic acid sequence specific of the said species. The presence of gut bacterial species is usually determined by detecting 16S rRNA gene sequences. However, this method is limited to known bacterial species.

[0037] By contrast, in the method of the invention, no prior identification of the bacterial species the said gene belongs to is required. The inventors have determined a minimum set of 25 bacterial gene sequences that are non-redundant sequences for each bacterial species of Table 1, and that can be used as tracer genes.

TABLE 1
bacterial species absent in overweight subjects
with reduced bacterial gut diversity,
and sequences comprised therein.

| Bacterial species | Sequences |
|---|---|
| MOHL-1 | SEQ ID NO. 1 to 25 |
| MOHL-2 | SEQ ID NO. 26 to 50 |
| MOHL-3 | SEQ ID NO. 51 to 75 |
| MOHL-4 | SEQ ID NO. 76 to 100 |
| MOHL-5 | SEQ ID NO. 101 to 125 |
| MOHL-6 | SEQ ID NO. 126 to 150 |
| MOHL-7 | SEQ ID NO. 151 to 175 |
| MOHL-8 | SEQ ID NO. 176 to 200 |
| MOHL-9 | SEQ ID NO. 201 to 225 |
| MOHL-10 | SEQ ID NO. 226 to 250 |
| MOHL-11 | SEQ ID NO. 251 to 275 |
| MOHL-12 | SEQ ID NO. 276 to 300 |
| MOHL-13 | SEQ ID NO. 301 to 325 |
| MOHL-14 | SEQ ID NO. 326 to 350 |
| MOHL-15 | SEQ ID NO. 351 to 375 |
| MOHL-16 | SEQ ID NO. 376 to 400 |
| MOHL-17 | SEQ ID NO. 401 to 425 |
| MOHL-18 | SEQ ID NO. 426 to 450 |

[0038] It will be obvious to the person skilled in the art that the number of bacteria from a given bacterial species in a sample directly correlate with the number of copies of at least one gene sequence detected in said sample. It is thereby possible to determine the absence of at least one of the bacterial species from Table 1, simply by detecting the absence of at least one bacterial gene from said species.

[0039] The invention therefore enables assessing reduced gut bacterial diversity in an overweight subject, and thereby the risk for said subject to develop obesity-related co-morbidities without the need for complex and tedious statistical analysis. Moreover, because the method of the invention can rely on as little as one bacterial gene as a marker, it may be implemented by any known technique of DNA amplification or sequencing, and is not limited to a specific method or apparatus.

[0040] Another embodiment of the invention is a method for determining whether an overweight subject has a reduced gut bacterial diversity, said method comprising:
[0041] a) detecting from a gut microbial DNA sample obtained from said subject whether at least one gene from at least one bacterial species from Table 1 is absent in said sample, and
[0042] b) determining that the subject has a reduced gut bacterial diversity, if at least one gene from at least one bacterial species from Table 1 is absent in said sample.

[0043] In a preferred embodiment, the bacterial genes sequences of the bacterial species according to the invention are chosen in the list consisting of sequence SEQ ID NO. 1 to sequence SEQ ID NO. 450.

[0044] Depending on the size of the sample and of the occurrence of the bacterial genes of interest, certain bacterial genes may be difficult to detect in a sample. The skilled person would thus easily conceive that, to increase the confidence of the results, it is advantageous to determine the absence of a bacterial species by detecting the average abundance of several bacterial genes from a bacterial species.

[0045] In an embodiment, detecting whether at least one bacterial gene from at least a bacterial species from Table 1 is absent in said sample comprises determining the number of copies of at least 1, 2, 3, 4 or 5 bacterial gene from said bacterial species in the sample. In a preferred embodiment, detecting whether at least one bacterial gene from at least one bacterial species from Table 1 is absent in said sample comprises determining the number of copies of at least 10, 15, 20 or at least 25 bacterial genes from said bacterial species in the sample.

[0046] Moreover, among all of the bacterial genes, some bacterial species are more significantly correlated with reduced gut bacterial diversity. For example, as shown in Table 3 of the experimental part, the detection of the presence or absence of one of the bacterial species among MO_HL_{—}5, MO_HL_{—}6, MO_HL_{—}14, MO_HL_{—}9, MO_HL_{—}11, MO_HL_{—}13, MO_HL_{—}3, MO_HL_{—}8, MO_HL_{—}16, MO_HL_{—}4, MO_HL_{—}17, MO_HL_{—}1, or MO_HL_{—}7 enables the detection of reduced bacterial diversity in a subject with an AUC superior to 0.83.

[0047] It is thereby possible to increase the sensitivity of the method of the invention, simply by assessing the presence or absence of those specific bacterial species, or of a least one gene from the specific bacterial species they belong to.

[0048] In an advantageous embodiment, the method of the invention comprises a step of detecting from a gut microbial DNA sample obtained from said subject whether at least one gene from a bacterial species chosen from the list consisting in MO_HL_{—}5, MO_HL_{—}6, MO_HL_{—}14, MO_HL_{—}9, MO_HL_{—}11, MO_HL_{—}13, MO_HL_{—}3, MO_HL_{—}8, MO_HL_{—}16, MO_HL_{—}4, MO_HL_{—}17, MO_HL_{—}1, or MO_HL_{—}7 from Table 1 is absent in said sample.

[0049] In a particularly advantageous embodiment, the method of the invention comprises a step of detecting from a gut microbial DNA sample obtained from said subject whether at least one gene from the bacterial species MOHL-5 from Table 1 is absent in said sample. The person skilled in the art knows that the more distinct bacterial species from Table 1 are present in the bacterial DNA from the feces of the subject, the higher the probability that the subjects has a reduced gut bacterial diversity. It would then be obvious to the skilled person that the sensitivity of the method of the invention can be increased by assessing the absence of bacterial genes from several different bacterial species from Table 1. It is then possible to increase the sensitivity of the method by using bacterial genes from a linear combination of 2, 3, 4, 5 or more different bacterial species. For example, the combinations of 2 bacterial species from Table 1 enable an AUC between around 0.775 and 0.948, the combinations of 3 bacterial species from Table 1 enable an AUC between around 0.813 and 0.993, and the combinations of 4 bacterial species from Table 1 and enable an AUC between around 0.827 and 0.987. However, the inventors have surprisingly discovered that the detection of specific combinations of 2, 3 or 4 bacterial species enables for very high AUC. The more advantageous combinations of 2, 3 and 4 bacterial species are indicated in Table 3, 4 and 5 respectively.

[0050] In a preferred embodiment, the method of the invention comprises a step of detecting from a gut microbial DNA sample obtained from said subject whether at least one gene from each of the bacterial species of any of the bacterial species combinations indicated in Table 3, 4 and/or 5 is absent in said sample.

[0051] The inventors have additionally selected bacterial species combinations of 2 to 18 bacterial species that enables for particularly important AUC, indicated in Table 6, ranging from around 0.89 to 0.99.

[0052] In an advantageous embodiment, the method of the invention comprises a step of detecting from a gut microbial DNA sample obtained from said subject whether:
[0053] at least one gene from each of the bacterial species MO_HL_{—}12 and MO_HL_{—}11 from Table 1 are absent in said sample, or;
[0054] at least one gene from each of the bacterial species MO_HL_{—}11, MO_HL_{—}7 and MO_HL_{—}12 from Table 1 are absent in said sample, or;
[0055] at least one gene from each of the bacterial species MO_HL_{—}11, MO_HL_{—}5, MO_HL_{—}7 and MO_HL_{—}12 from Table 1 are absent in said sample, or;
[0056] at least one gene from each of the bacterial species MO_HL_{—}11, MO_HL_{—}8, MO_HL_{—}12, MO_HL_{—}7 and MO_HL_{—}2 from Table 1 are absent in said sample, or;
[0057] at least one gene from each of the bacterial species MO_HL_{—}17, MO_HL_{—}5, MO_HL_{—}12, MO_HL_{—}7, MO_HL_{—}11 and MO_HL_{—}8 from Table 1 are absent in said sample, or;
[0058] at least one gene from each of the bacterial species MO_HL_{—}12, MO_HL_{—}11, MO_HL_{—}2, MO_HL_{—}5, MO_HL_{—}8, MO_HL_{—}13 and MO_HL_{—}7 from Table 1 are absent in said sample, or;
[0059] at least one gene from each of the bacterial species MO_HL_{—}12, MO_HL_{—}2, MO_HL_{—}17, MO_HL_{—}11, MO_HL_{—}13, MO_HL_{—}5, MO_HL_{—}8 and MO_HL_{—}7 from Table 1 are absent in said sample, or;
[0060] at least one gene from each of the bacterial species MO_HL_{—}4, MO_HL_{—}11, MO_HL_{—}6, MO_HL_{—}13, MO_HL_{—}2, MO_HL_{—}8, MO_HL_{—}12, MO_HL_{—}7 and MO_HL_{—}17 from Table 1 are absent in said sample, or;
[0061] at least one gene from each of the bacterial species MO_HL_{—}8, MO_HL_{—}11, MO_HL_{—}6, MO_HL_{—}4, MO_HL_{—}13, MO_HL_{—}5, MO_HL_{—}2, MO_HL_{—}7, MO_HL_{—}17 and MO_HL_{—}12 from Table 1 are absent in said sample;
[0062] at least one gene from each of the bacterial species MO_HL_{—}5, MO_HL_{—}13, MO_HL_{—}4, MO_HL_{—}12, MO_HL_{—}15, MO_HL_{—}17, MO_HL_{—}6, MO_HL_{—}2, MO_HL_{—}8, MO_HL_{—}7 and MO_HL_{—}11 from Table 1 are absent in said sample;
[0063] at least one gene from each of the bacterial species MO_HL_{—}11, MO_HL_{—}6, MO_HL_{—}17, MO_HL_{—}4, MO_HL_{—}3, MO_HL_{—}12, MO_HL_{—}5, MO_HL_{—}10, MO_HL_{—}8, MO_HL_{—}7, MO_HL_{—}2 and MO_HL_{—}13 from Table 1 are absent, in said sample;
[0064] at least one gene from each of the bacterial species MO_HL_{—}18, MO_HL_{—}15, MO_HL_{—}11, MO_HL_{—}10, MO_HL_{—}5, MO_HL_{—}4, MO_HL_{—}6, MO_HL_{—}8, MO_HL_{—}12, MO_HL_{—}7, MO_HL_{—}2, MO_HL_{—}13 and MO_HL_{—}3 from Table 1 are absent in said sample, or;
[0065] at least one gene from each of the bacterial species MO_HL_{—}6, MO_HL_{—}17, MO_HL_{—}3, MO_HL_{—}2, MO_HL_{—}4, MO_HL_{—}18, MO_HL_{—}5, MO_HL_{—}13, MO_HL_{—}10, MO_HL_{—}15, MO_HL_{—}7, MO_HL_{—}1, MO_HL_{—}8 and MO_HL_{—}12 from Table 1 are absent in said sample, or;
[0066] at least one gene from each of the bacterial species MO_HL_{—}10, MO_HL_{—}18, MO_HL_{—}2, MO_HL_{—}13, MO_HL_{—}7, MO_HL_{—}1, MO_HL_{—}11, MO_HL_{—}3, MO_HL_{—}4, MO_HL_{—}15, MO_HL_{—}5, MO_HL_{—}6, MO_HL_{—}17, MO_HL_{—}12 and MO_HL_{—}8 from Table 1 are absent, in said sample;
[0067] at least one gene from each of the bacterial species MO_HL_{—}7, MO_HL_{—}4, MO_HL_{—}13, MO_HL_{—}1, MO_HL_{—}5, MO_HL_{—}6, MO_HL_{—}11, MO_HL_{—}12, MO_HL_{—}8, MO_HL_{—}3, MO_HL_{—}18, MO_HL_{—}2, MO_HL_{—}10, MO_HL_{—}17, MO_HL_{—}15 and MO_HL_{—}9 from Table 1 are absent in said sample, or;
[0068] at least one gene from each of the bacterial species MO_HL_{—}10, MO_HL_{—}8, MO_HL_{—}1, MO_HL_{—}16, MO_HL_{—}18, MO_HL_{—}5, MO_HL_{—}15, MO_HL_{—}2, MO_HL_{—}7, MO_HL_{—}6, MO_HL_{—}13, MO_HL_{—}11, MO_HL_{—}17, MO_HL_{—}3, MO_HL_{—}14, MO_HL_{—}4 and MO_HL_{—}12 from Table 1 are absent, in said sample;
[0069] at least one gene from each of the bacterial species MO_HL_{—}15, MO_HL_{—}17, MO_HL_{—}4, MO_HL_{—}14, MO_HL_{—}16, MO_HL_{—}10, MO_HL_{—}7, MO_HL_{—}6, MO_HL_{—}11, MO_HL_{—}9, MO_HL_{—}5, MO_HL_{—}3, MO_HL_{—}8, MO_HL_{—}1, MO_HL_{—}12, MO_HL_{—}18, MO_HL_{—}13 and MO_HL_{—}2 from Table 1 are absent, in said sample.

[0070] A bacterial gene is absent from the sample when its number of copies in the sample is inferior to a certain threshold value. Accordingly, a bacterial gene is present in the sample when its number of copies in the sample is inferior to a certain threshold value.

[0071] According to the present invention, a “threshold value” is intended to mean a value that permits to discriminate samples in which the number of copies of the bacterial gene of interest is low or high.

[0072] In particular, if a number of copies of a bacterial gene of interest is inferior or equal to the threshold value, then the number of copies of this bacterial gene in the sample is considered low, whereas if the number of copies is superior to the threshold value, then the number of copies of this bacterial gene in the sample is considered high. A low copy number means that the bacterial gene is absent from the sample, whereas a high number of copies means that the bacterial gene is present in the sample.

[0073] For each gene, and depending on the method used for measuring the number of copies of the bacterial gene, the optimal threshold value may vary. However, it may be easily determined by a skilled person based on the analysis of the microbiome of several individuals in which the number of copies (low or high) is known for this particular bacterial gene, and on the comparison thereof with the number of copies of a control gene. Such a comparison may be facilitated by using the same amount of bacterial DNA for each of the analyzed samples, or by dividing the number of copies of the bacterial gene obtained, by the initial amount of bacterial DNA used in the test. Indeed, it is well known from the skilled person that the total amount of bacteria in the gut of a subject, and consequently in its feces, remains the same even in the case of reduced bacterial diversity. It is also possible to use a reference such as a gut bacterial species whose abundance is known not to vary between individuals with reduced and normal bacterial diversity.

[0074] According to the invention, determining the number of copies of at least one bacterial gene in a sample obtained from the subject can be achieved by any technique capable of detecting and quantifying nucleic acids sequences, and include inter alia hybridization with a labelled probe, PCR amplification, sequencing, and all other methods known to the person of skills in the art.

[0075] In a first embodiment, determining the number of copies of at least one bacterial gene in a sample obtained from the subject is performed using sequencing. Optionally, DNA is be fragmented, for example by restriction nuclease prior to sequencing. Sequencing is done using any technique known in the state of the art, including sequencing by ligation, pyrosequencing, sequencing-by-synthesis or single-molecule sequencing. Sequencing also includes PCR-Based techniques, such as for example quantitative PCR or emulsion PCR.

[0076] Sequencing is performed on the entire DNA contained in the biological sample, or on portions of the DNA contained in the biological sample. It will be immediately clear to the skilled person that the said sample contains at least a mixture of bacterial DNA and of human DNA from the host subject. However, though the overall bacterial DNA is likely to represent the major fraction of the total DNA present in the sample, each bacterial species may only represent a small fraction of the total DNA present in the sample.

[0077] To overcome this difficulty, the skilled person can use a method that allows the quantitative genotyping of sequences obtained from the biological sample with high precision. In one embodiment of this approach, the precision is achieved by analysis of a large number (for example, millions or billions) of polynucleotides. Furthermore, the precision can be enhanced by the use of massively parallel DNA sequencing, such as, but not limited to that performed by the Illumina Genome Analyzer platform (Bentley et al. Nature; 456: 53-59, 2008), the Roche 454 platform (Margulies et al. Nature; 437: 376-380, 2005), the ABI SOLiD platform (McKernan et al., Genome Res; 19: 1527-1541, 2009), the Helicos single molecule sequencing platform (Harris et al. Science; 320: 106-109, 2008), real-time sequencing using single polymerase molecules (Science; 323: 133-138, 2009), Ion Torrent sequencing (WO 2010/008480; Rothberg et al., Nature, 475: 348-352, 2011) and nanopore sequencing (Clarke J et al. Nat Nanotechnol.; 4: 265-270, 2009).

[0078] When the skilled person relies on sequencing methods to detect the presence or absence of certain bacterial genes, the information collected from sequencing is used to determine the number of copies of nucleic acid sequences of interest via bioinformatics procedures. For example, in an embodiment, the nucleic acid sequences of said bacterial species in the gut bacterial DNA sample are identified in the global sequencing data by comparison with the nucleic acid sequences SEQ ID NO. 1 to SEQ ID NO. 450. This comparison is advantageously based on the level of sequence identity with the sequences SEQ ID NO. 1 to SEQ ID NO. 450.

[0079] Thus, a nucleic acid sequence displaying at least 90%, at least 95%, at least 96%, at least 97%, at least 98%, at least 99%, or 100% identity with at least one of the nucleic acid sequences SEQ ID NO. 1 to SEQ ID NO. 450 is identified as a sequence comprised in one of the bacterial species of the invention.

[0080] Thus, in a preferred embodiment, detecting whether at least one bacterial species from Table 1 is absent in said sample comprises determining the number of nucleic acid sequences in the gut bacterial DNA sample having at least 90%, at least 95%, at least 96%, at least 97%, at least 98%, at least 99%, or 100% identity with at least one of the nucleic acid sequences SEQ ID NO. 1 to SEQ ID NO. 450.

[0081] The term “sequence identity” herein refers to the identity between two nucleic acids sequences. Identity between sequences can be determined by comparing a position in each of the sequences which may be aligned for the purposes of comparison. When a position in the compared sequences is occupied by the same base, then the sequences are identical at that position. A degree of sequence identity between nucleic acid sequences is a function of the number of identical nucleotides at positions shared by these sequences.

[0082] To determine the percent identity of two amino acids sequences, the sequences are aligned for optimal comparison. For example, gaps can be introduced in the sequence of a first nucleic acid sequence for optimal alignment with the second nucleic acid sequence. The nucleotides at corresponding nucleotide positions are then compared. When a position in the first sequence is occupied by the same nucleotide as the corresponding position in the second sequence, the molecules are identical at that position. The percent identity between the two sequences is a function of the number of identical positions shared by the sequences. Hence % identity=number of identical positions/total number of overlapping positions×100.

[0083] In this comparison the sequences can be the same length or can be different in length. Optimal alignment of sequences for determining a comparison window may be conducted by the local homology algorithm of Smith and Waterman (J. Theor. Biol., 91(2): 370-380, 1981), by the homology alignment algorithm of Needleman and Wunsch (J. Mol. Biol, 48(3): 443-453, 1972), by the search for similarity via the method of Pearson and Lipman (Proc. Natl. Acad. Sci. U.S.A., 85(5): 2444-2448, 1988), by computerized implementations of these algorithms (GAP, BESTFIT, FASTA and TFASTA in the Wisconsin Genetics Software Package Release 7.0, Genetic Computer Group, 575, Science Drive, Madison, Wis.) or by inspection. The best alignment (i.e. resulting in the highest percentage of identity over the comparison window) generated by the various methods is selected.

[0084] The term “sequence identity” thus means that two polynucleotide sequences are identical (i.e. on a nucleotide by nucleotide basis) over the window of comparison. The term “percentage of sequence identity” is calculated by comparing two optimally aligned sequences over the window of comparison, determining the number of positions at which the identical nucleic acid base (e.g. A, T, C, G, U, or I) occurs in both sequences to yield the number of matched positions, dividing the number of matched positions by the total number of positions in the window of comparison (i.e. the window size) and multiplying the result by 100 to yield the percentage of sequence identity. The same process can be applied to polypeptide sequences. The percentage of sequence identity of a nucleic acid sequence or an amino acid sequence can also be calculated using BLAST software (Version 2.06 of September 1998) with the default or user defined parameter.

[0085] In another preferred embodiment, PCR-based techniques are used to determine the number of copies of at least one bacterial gene. Preferably, the PCR technique used quantitatively measures starting amounts of DNA, cDNA, or RNA. Examples of PCR-based techniques according to the invention include techniques such as, but not limited to, quantitative PCR (Q-PCR), reverse-transcriptase polymerase chain reaction (RT-PCR), quantitative reverse-transcriptase PCR (QRT-PCR), rolling circle amplification (RCA) or digital PCR. These techniques are well known and easily available technologies for those skilled in the art and do not need a precise description. In a preferred embodiment, the determination of the copy number of the bacterial genes of the invention is performed by quantitative PCR.

[0086] Amplification primers specific for the genes to be tested are thus also very useful for performing the methods according to the invention. The present invention thus also encompasses primers for amplifying at least one gene selected from the genes of sequence SEQ ID NO. 1-450.

[0087] In another preferred embodiment, the presence or absence of the bacterial genes according to the invention is detected by the use of a nucleic microarray.

[0088] According to the invention, a “nucleic microarray” consists of different nucleic acid probes that are attached to a substrate, which can be a microchip, a glass slide or a microsphere-sized bead. A microchip may be constituted of polymers, plastics, resins, polysaccharides, silica or silica-based materials, carbon, metals, inorganic glasses, or nitrocellulose. Probes can be nucleic acids such as cDNAs (“cDNA microarray”) or oligonucleotides (“oligonucleotide microarray”), and the oligonucleotides may be about 25 to about 60 base pairs or less in length.

[0089] To determine the copy number of a target nucleic sample, said sample is labelled, contacted with the microarray in hybridization conditions, leading to the formation of complexes between target nucleic acids that are complementary to probe sequences attached to the microarray surface. The presence of labelled hybridized complexes is then detected. Many variants of the microarray hybridization technology are available to the man skilled in the art.

[0090] In a specific embodiment, the nucleic microarray is an oligonucleotide microarray comprising at least one oligonucleotide specific for at least one gene having a sequence selected from SEQ ID NOs 1-450. Preferably, the said microarray comprises at least 18 oligonucleotides, each oligonucleotide being specific for one gene of a distinct cluster of the invention. More preferably, the microarray of the invention consists of 450 oligonucleotides specific for each of the genes of sequences SEQ ID NOs. 1-450.

[0091] In another embodiment, the nucleic microarray is an oligonucleotide microarray comprising at least one oligonucleotide specific for at least one gene of each of the bacterial species MO_HL_{—}12 and MO_HL_{—}11. Preferably, the nucleic microarray is an oligonucleotide microarray comprising or consisting in oligonucleotides specific for at least 2, 3, 4, 5, 10, 20, or 25 genes of each of the bacterial species MO_HL_{—}12 and MO_HL_{—}11.

[0092] In another embodiment, the nucleic microarray is an oligonucleotide microarray comprising at least one oligonucleotide specific for at least one gene of each of the bacterial species MO_HL_{—}11, MO_HL_{—}7 and MO_HL_{—}12. Preferably, the nucleic microarray is an oligonucleotide microarray comprising or consisting in oligonucleotides specific for at least 2, 3, 4, 5, 10, 20, or 25 genes of each of the bacterial species MO_HL_{—}11, MO_HL_{—}7 and MO_HL_{—}12.

[0093] In another embodiment, the nucleic microarray is an oligonucleotide microarray comprising at least one oligonucleotide specific for at least one gene of each of the bacterial species MO_HL_{—}11, MO_HL_{—}5, MO_HL_{—}7 and MO_HL_{—}12. Preferably, the nucleic microarray is an oligonucleotide microarray comprising or consisting in oligonucleotides specific for at least 2, 3, 4, 5, 10, 20, or 25 genes of each of the bacterial species MO_HL_{—}11, MO_HL_{—}5, MO_HL_{—}7 and MO_HL_{—}12.

[0094] In another embodiment, the nucleic microarray is an oligonucleotide microarray comprising at least one oligonucleotide specific for at least one gene of each of the bacterial species MO_HL_{—}11, MO_HL_{—}8, MO_HL_{—}12, MO_HL_{—}7 and MO_HL_{—}2. Preferably, the nucleic microarray is an oligonucleotide microarray comprising or consisting in oligonucleotides specific for at least 2, 3, 4, 5, 10, 20, or 25 genes of each of the bacterial species MO_HL_{—}11, MO_HL_{—}8, MO_HL_{—}12, MO_HL_{—}7 and MO_HL_{—}2

[0095] In another embodiment, the nucleic microarray is an oligonucleotide microarray comprising at least one oligonucleotide specific for at least one gene of each of the bacterial species MO_HL_{—}17, MO_HL_{—}5, MO_HL_{—}12, MO_HL_{—}7, MO_HL_{—}11 and MO_HL_{—}8. Preferably, the nucleic microarray is an oligonucleotide microarray comprising or consisting in oligonucleotides specific for at least 2, 3, 4, 5, 10, 20, or 25 genes of each of the bacterial species MO_HL_{—}17, MO_HL_{—}5, MO_HL_{—}12, MO_HL_{—}7, MO_HL_{—}11 and MO_HL_{—}8.

[0096] In another embodiment, the nucleic microarray is an oligonucleotide microarray comprising at least one oligonucleotide specific for at least one gene of each of the bacterial species MO_HL_{—}12, MO_HL_{—}11, MO_HL_{—}2, MO_HL_{—}5, MO_HL_{—}8, MO_HL_{—}13 and MO_HL_{—}7. Preferably, the nucleic microarray is an oligonucleotide microarray comprising or consisting in oligonucleotides specific for at least 2, 3, 4, 5, 10, 20, or 25 genes of each of the bacterial species MO_HL_{—}12, MO_HL_{—}11, MO_HL_{—}2, MO_HL_{—}5, MO_HL_{—}8, MO_HL_{—}13 and MO_HL_{—}7.

[0097] In another embodiment, the nucleic microarray is an oligonucleotide microarray comprising at least one oligonucleotide specific for at least one gene of each of the bacterial species MO_HL_{—}12, MO_HL_{—}2, MO_HL_{—}17, MO_HL_{—}11, MO_HL_{—}13, MO_HL_{—}5, MO_HL_{—}8 and MO_HL_{—}7. Preferably, the nucleic microarray is an oligonucleotide microarray comprising or consisting in oligonucleotides specific for at least 2, 3, 4, 5, 10, 20, or 25 genes of each of the bacterial species MO_HL_{—}12, MO_HL_{—}2, MO_HL_{—}17, MO_HL_{—}11, MO_HL_{—}13, MO_HL_{—}5, MO_HL_{—}8 and MO_HL_{—}7.

[0098] In another embodiment, the nucleic microarray is an oligonucleotide microarray comprising at least one oligonucleotide specific for at least one gene of each of the bacterial species MO_HL_{—}4, MO_HL_{—}11, MO_HL_{—}6, MO_HL_{—}13, MO_HL_{—}2, MO_HL_{—}8, MO_HL_{—}12, MO_HL_{—}7 and MO_HL_{—}17. Preferably, the nucleic microarray is an oligonucleotide microarray comprising or consisting in oligonucleotides specific for at least 2, 3, 4, 5, 10, 20, or 25 genes of each of the bacterial species MO_HL_{—}4, MO_HL_{—}11, MO_HL_{—}6, MO_HL_{—}13, MO_HL_{—}2, MO_HL_{—}8, MO_HL_{—}12, MO_HL_{—}7 and MO_HL_{—}17.

[0099] In another embodiment, the nucleic microarray is an oligonucleotide microarray comprising at least one oligonucleotide specific for at least one gene of each of the bacterial species MO_HL_{—}8, MO_HL_{—}11, MO_HL_{—}6, MO_HL_{—}4, MO_HL_{—}13, MO_HL_{—}5, MO_HL_{—}2, MO_HL_{—}7, MO_HL_{—}17 and MO_HL_{—}12. Preferably, the nucleic microarray is an oligonucleotide microarray comprising or consisting in oligonucleotides specific for at least 2, 3, 4, 5, 10, 20, or 25 genes of each of the bacterial species MO_HL_{—}8, MO_HL_{—}11, MO_HL_{—}6, MO_HL_{—}4, MO_HL_{—}13, MO_HL_{—}5, MO_HL_{—}2, MO_HL_{—}7, MO_HL_{—}17 and MO_HL_{—}12.

[0100] In another embodiment, the nucleic microarray is an oligonucleotide microarray comprising at least one oligonucleotide specific for at least one gene of each of the bacterial species MO_HL_{—}5, MO_HL_{—}13, MO_HL_{—}4, MO_HL_{—}12, MO_HL_{—}15, MO_HL_{—}17, MO_HL_{—}6, MO_HL_{—}2, MO_HL_{—}8, MO_HL_{—}7 and MO_HL_{—}11. Preferably, the nucleic microarray is an oligonucleotide microarray comprising or consisting in oligonucleotides specific for at least 2, 3, 4, 5, 10, 20, or 25 genes of each of the bacterial species MO_HL_{—}5, MO_HL_{—}13, MO_HL_{—}4, MO_HL_{—}12, MO_HL_{—}15, MO_HL_{—}17, MO_HL_{—}6, MO_HL_{—}2, MO_HL_{—}8, MO_HL_{—}7 and MO_HL_{—}11.

[0101] In another embodiment, the nucleic microarray is an oligonucleotide microarray comprising at least one oligonucleotide specific for at least one gene of each of the bacterial species MO_HL_{—}11, MO_HL_{—}6, MO_HL_{—}17, MO_HL_{—}4, MO_HL_{—}3, MO_HL_{—}12, MO_HL_{—}5, MO_HL_{—}10, MO_HL_{—}8, MO_HL_{—}7, MO_HL_{—}2 and MO_HL_{—}13. Preferably, the nucleic microarray is an oligonucleotide microarray comprising or consisting in oligonucleotides specific for at least 2, 3, 4, 5, 10, 20, or 25 genes of each of the bacterial species MO_HL_{—}11, MO_HL_{—}6, MO_HL_{—}17, MO_HL_{—}4, MO_HL_{—}3, MO_HL_{—}12, MO_HL_{—}5, MO_HL_{—}10, MO_HL_{—}8, MO_HL_{—}7, MO_HL_{—}2 and MO_HL_{—}13.

[0102] In another embodiment, the nucleic microarray is an oligonucleotide microarray comprising at least one oligonucleotide specific for at least one gene of each of the bacterial species MO_HL_{—}18, MO_HL_{—}15, MO_HL_{—}11, MO_HL_{—}10, MO_HL_{—}5, MO_HL_{—}4, MO_HL_{—}6, MO_HL_{—}8, MO_HL_{—}12, MO_HL_{—}7, MO_HL_{—}2, MO_HL_{—}13 and MO_HL_{—}3 Preferably, the nucleic microarray is an oligonucleotide microarray comprising or consisting in oligonucleotides specific for at least 2, 3, 4, 5, 10, 20, or 25 genes of each of the bacterial species MO_HL_{—}18, MO_HL_{—}15, MO_HL_{—}11, MO_HL_{—}10, MO_HL_{—}5, MO_HL_{—}4, MO_HL_{—}6, MO_HL_{—}8, MO_HL_{—}12, MO_HL_{—}7, MO_HL_{—}2, MO_HL_{—}13 and MO_HL_{—}3.

[0103] In another embodiment, the nucleic microarray is an oligonucleotide microarray comprising at least one oligonucleotide specific for at least one gene of each of the bacterial species MO_HL_{—}6, MO_HL_{—}17, MO_HL_{—}3, MO_HL_{—}2, MO_HL_{—}4, MO_HL_{—}18, MO_HL_{—}5, MO_HL_{—}13, MO_HL_{—}10, MO_HL_{—}15, MO_HL_{—}7, MO_HL_{—}1, MO_HL_{—}8 and MO_HL_{—}12. Preferably, the nucleic microarray is an oligonucleotide microarray comprising or consisting in oligonucleotides specific for at least 2, 3, 4, 5, 10, 20, or 25 genes of each of the bacterial species MO_HL_{—}6, MO_HL_{—}17, MO_HL_{—}3, MO_HL_{—}2, MO_HL_{—}4, MO_HL_{—}18, MO_HL_{—}5, MO_HL_{—}13, MO_HL_{—}10, MO_HL_{—}15, MO_HL_{—}7, MO_HL_{—}1, MO_HL_{—}8 and MO_HL_{—}12.

[0104] In another embodiment, the nucleic microarray is an oligonucleotide microarray comprising at least one oligonucleotide specific for at least one gene of each of the bacterial species MO_HL_{—}10, MO_HL_{—}18, MO_HL_{—}2, MO_HL_{—}13, MO_HL_{—}7, MO_HL_{—}1, MO_HL_{—}11, MO_HL_{—}3, MO_HL_{—}4, MO_HL_{—}15, MO_HL_{—}5, MO_HL_{—}6, MO_HL_{—}17, MO_HL_{—}12 and MO_HL_{—}8 Preferably, the nucleic microarray is an oligonucleotide microarray comprising or consisting in oligonucleotides specific for at least 2, 3, 4, 5, 10, 20, or 25 genes of each of the bacterial species MO_HL_{—}10, MO_HL_{—}18, MO_HL_{—}2, MO_HL_{—}13, MO_HL_{—}7, MO_HL_{—}1, MO_HL_{—}11, MO_HL_{—}3, MO_HL_{—}4, MO_HL_{—}15, MO_HL_{—}5, MO_HL_{—}6, MO_HL_{—}17, MO_HL_{—}12 and MO_HL_{—}8.

[0105] In another embodiment, the nucleic microarray is an oligonucleotide microarray comprising at least one oligonucleotide specific for at least one gene of each of the bacterial species MO_HL_{—}7, MO_HL_{—}4, MO_HL_{—}13, MO_HL_{—}1, MO_HL_{—}5, MO_HL_{—}6, MO_HL_{—}11, MO_HL_{—}12, MO_HL_{—}8, MO_HL_{—}3, MO_HL_{—}18, MO_HL_{—}2, MO_HL_{—}10, MO_HL_{—}17, MO_HL_{—}15 and MO_HL_{—}9. Preferably, the nucleic microarray is an oligonucleotide microarray comprising or consisting in oligonucleotides specific for at least 2, 3, 4, 5, 10, 20, or 25 genes of each of the bacterial species MO_HL_{—}7, MO_HL_{—}4, MO_HL_{—}13, MO_HL_{—}1, MO_HL_{—}5, MO_HL_{—}6, MO_HL_{—}11, MO_HL_{—}12, MO_HL_{—}8, MO_HL_{—}3, MO_HL_{—}18, MO_HL_{—}2, MO_HL_{—}10, MO_HL_{—}17, MO_HL_{—}15 and MO_HL_{—}9.

[0106] In another embodiment, the nucleic microarray is an oligonucleotide microarray comprising at least one oligonucleotide specific for at least one gene of each of the bacterial species MO_HL_{—}10, MO_HL_{—}8, MO_HL_{—}1, MO_HL_{—}16, MO_HL_{—}18, MO_HL_{—}5, MO_HL_{—}15, MO_HL_{—}2, MO_HL_{—}7, MO_HL_{—}6, MO_HL_{—}13, MO_HL_{—}11, MO_HL_{—}17, MO_HL_{—}3, MO_HL_{—}14, MO_HL_{—}4 and MO_HL_{—}12. Preferably, the nucleic microarray is an oligonucleotide microarray comprising or consisting in oligonucleotides specific for at least 2, 3, 4, 5, 10, 20, or 25 genes of each of the bacterial species MO_HL_{—}10, MO_HL_{—}8, MO_HL_{—}1, MO_HL_{—}16, MO_HL_{—}18, MO_HL_{—}5, MO_HL_{—}15, MO_HL_{—}2, MO_HL_{—}7, MO_HL_{—}6, MO_HL_{—}13, MO_HL_{—}11, MO_HL_{—}17, MO_HL_{—}3, MO_HL_{—}14, MO_HL_{—}4 and MO_HL_{—}12.

[0107] In another embodiment, the nucleic microarray is an oligonucleotide microarray comprising at least one oligonucleotide specific for at least one gene of each of the bacterial species MO_HL_{—}15, MO_HL_{—}17, MO_HL_{—}4, MO_HL_{—}14, MO_HL_{—}16, MO_HL_{—}10, MO_HL_{—}7, MO_HL_{—}6, MO_HL_{—}11, MO_HL_{—}9, MO_HL_{—}5, MO_HL_{—}3, MO_HL_{—}8, MO_HL_{—}1, MO_HL_{—}12, MO_HL_{—}18, MO_HL_{—}13 and MO_HL_{—}2. Preferably, the nucleic microarray is an oligonucleotide microarray comprising or consisting in oligonucleotides specific for at least 2, 3, 4, 5, 10, 20, or 25 genes of each of the bacterial species MO_HL_{—}15, MO_HL_{—}17, MO_HL_{—}4, MO_HL_{—}14, MO_HL_{—}16, MO_HL_{—}10, MO_HL_{—}7, MO_HL_{—}6, MO_HL_{—}11, MO_HL_{—}9, MO_HL_{—}5, MO_HL_{—}3, MO_HL_{—}8, MO_HL_{—}1, MO_HL_{—}12, MO_HL_{—}18, MO_HL_{—}13 and MO_HL_{—}2.

[0108] Said microarray may further comprise at least one oligonucleotide for detecting at least one gene of at least one control bacterial species. A convenient bacterial species may be e.g. a bacterial species whose abundance does not vary between individuals with a reduced bacterial diversity and individuals with normal bacterial diversity. Preferably, the oligonucleotides are about 50 bases in length.

[0109] SuiTable microarray oligonucleotides specific for any gene of SEQ ID NOs. 1-450 may be designed, based on the genomic sequence of each gene, using any method of microarray oligonucleotide design known in the art. In particular, any available software developed for the design of microarray oligonucleotides may be used, such as, for instance, the OligoArray software (available at http://berry.engin.umich edu/oligoarray/), the GoArrays software (available at http://www.isima.fr/bioinfo/goarrays/), the Array Designer software (available at http://www.premierbiosoft.com/dnamicroarray/index.html), the Primer3 software (available at http://frodo.wi.mit.edu/primer3/primer3_code.html), or the Promide software (available at http://oligos.molgen.mpg.de/).

[0110] The invention further concerns a kit for the in vitro determination of the reduced gut bacterial diversity phenotype, comprising at least one reagent for the determination of the copy number of at least one gene having a sequence selected from SEQ ID NOs. 1-450. By “a reagent for the determination of the copy number of at least one gene”, it is meant a reagent which specifically allows for the determination of the copy number of the said gene, i.e. a reagent specifically intended for the specific determination of the copy number of at least one gene having a sequence selected from SEQ ID NOs. 1-450. This definition excludes generic reagents useful for the determination of the expression level of any gene, such as Taq polymerase or an amplification buffer, although such reagents may also be included in a kit according to the invention. Such a reagent for the determination of the copy number of at least one gene can be for example a dedicated microarray as described above or amplification primers specific for at least one gene having a sequence selected from SEQ ID NOs. 1-450. The present invention thus also relates to a kit for the in vitro determination of the reduced gut bacterial diversity phenotype, said kit comprising a dedicated microarray as described above or amplification primers specific for at least one gene having a sequence selected from SEQ ID NOs. 1-450. Here also, when the kit comprises amplification primers, while said kit may comprise amplification primers specific for other genes, said kit preferably comprises at most 100, at most 75, 50, at most 40, at most 30, preferably at most 25, at most 20, at most 15, more preferably at most 10, at most 8, at most 6, even more preferably at most 5, at most 4, at most 3 or even 2 or one or even zero couples of amplification primers specific for other genes than the genes of sequences SEQ ID NOs 1-450. For example, said kit may comprise at least a couple of amplification primers for at least one gene in addition to the primers for at least one gene having a sequence selected from SEQ ID NOs. 1-450.

[0111] Such a kit for the in vitro determination of the reduced gut bacterial diversity phenotype may further comprise instructions for detection of the presence or absence of a responsive phenotype.

[0112] As the inventors have shown, overweight subject with a reduced gut bacterial diversity present a higher risk of obesity-associated co-morbidities. Determining that an overweight subject has a reduced gut bacterial diversity is therefore extremely useful in the determination of such risk, particularly as it is realized entirely in vitro.

[0113] Another object of the invention is therefore a method for determining if an overweight subject is at risk to develop obesity related co-morbidities, said method comprising the steps of:
[0114] a) determining that said subject has a reduced gut bacterial diversity with a method according to the invention;
[0115] b) if said subject has a reduced gut bacterial diversity, determining that said overweight subject is at is at risk to develop obesity related co-morbidities.

[0116] Obesity related co-morbidities are well known of the skilled person. They have been thoroughly studied in scientific literature, and a comprehensive list of them may be found in Guh D. et al, BMC Public Health., 9:88, 2009. The most significant of them are type II diabetes, all cancers except esophageal, pancreatic and prostate cancer, all cardiovascular diseases (except congestive heart failure), asthma, gallbladder disease, osteoarthritis and chronic back pain.

[0117] Thus, in an embodiment, the method of the invention is for determining if an overweight subject is at risk to develop type II diabetes, all cancers except esophageal, pancreatic and prostate cancer, all cardiovascular diseases (except congestive heart failure), asthma, gallbladder disease, osteoarthritis and chronic back pain.

[0118] Moreover, the inventors have found that the gut bacterial microbiome of overweigth subject with a reduced gut bacterial diversity can be enriched by modifications of their diet, that is to say by implementing a specific diet. Indeed, they discovered that gut bacterial diversity, can be increased with a low calorie, protein-rich diet. The inventors showed that the gut bacterial diversity increase due to the implementation of said diet is more significant in overweight subjects with a reduced bacterial diversity. Those subjects are therefore particularly prone to benefit from dietary intervention.

[0119] Another object of the invention is therefore a method for determining if an overweight subject is in need of a diet, said method comprising the steps of:
[0120] a) determining that said subject has a reduced gut bacterial diversity with a method of the invention;
[0121] b) if said subject has a reduced gut bacterial diversity, determining that said subject is in need of a diet.

[0122] In a preferred embodiment, the diet of the invention is a low calorie protein rich diet. In a more preferred embodiment, the diet of the invention comprises diets of between 1,200 and 1,500 Kcal per day, wherein the proteins represent 35% of the total amount of calories, the lipids represent 25% of the total amount of calories, the carbohydrates represent 44% of the total amount of calories. Advantageously, if the overweight subject is a woman, the diet comprises 1,200 Kcal per day and if the overweight subject is a man, the diet comprises 1,500 Kcal per day.

[0123] Importantly, this enrichment in gut bacterial species is correlated with an alleviation of the clinical traits linked to obesity-related co-morbidities, and thus the risk to develop obesity-related co-morbidities, except for low grade inflammation.

[0124] Another object of the invention is a method for alleviating the risks to develop obesity-related co-morbidities, said method comprising the steps of:
[0125] a) determining that said subject has a reduced gut bacterial diversity with a method of the invention;
[0126] b) if said subject has a reduced gut bacterial diversity, determining that said subject is in need of a diet.

[0127] It will be immediately apparent to the person skilled in the art that overweight subjects with a reduced gut bacterial diversity that also present low grade inflammation may only partially benefit from implementing a diet. It is however particularly important to treat low-grade inflammation as soon as possible and therefore to be able to distinguish between overweight subjects for which low grade inflammation can efficiently be alleviated by dietary intervention only, and those whose low-grade inflammation requires additional treatments. The method of the invention allows for an early detection of those subjects that will require low-grade inflammation treatments in addition to the implementation of the diet.

[0128] Another object of the invention is therefore a method for determining if an overweight subject is in need of a low-grade inflammation treatment, preferably in addition to the implementation of a diet, comprising the steps of:
[0129] a) determining that said subject has a reduced gut bacterial diversity with a method of the invention;
[0130] b) if said subject has a reduced gut bacterial diversity, determining that said subject is in need of a low-grade inflammation treatment, preferably in addition to the implementation of a diet.

[0131] The additional low-grade inflammation treatments can be any conventional anti-inflammation treatment such as the lipid lowering 3-hydroxy-3-methylglutaryl coenzyme A (HMG-Co A) reductase inhibitors (statins) and also the insulin sensitizing peroxisome proliferator activated receptor γ activators (thiazolidinediones).

[0132] The evolution of the bacterial diversity with implementation of those modifications of the diet can easily be monitored with the method of the invention.

[0133] Another object of the invention is therefore a method for monitoring the efficiency of a diet in increasing gut bacterial microbiome richness in an overweight subject in need thereof, said method comprising the steps of:
[0134] a) determining that said subject has a reduced gut bacterial diversity with a method of the invention;
[0135] b) implementing said diet;
[0136] c) determining from a second gut microbial DNA sample obtained from said subject if said subject has a reduced gut bacterial diversity with a method of the invention;
[0137] d) if said subject has a reduced gut bacterial diversity, determining that the diet is efficient in increasing gut bacterial microbiome richness in said subject

[0138] The practice of the invention employs, unless other otherwise indicated, conventional techniques or protein chemistry, molecular virology, microbiology, recombinant DNA technology, and pharmacology, which are within the skill of the art. Such techniques are explained fully in the literature. (See Ausubel et al., Current Protocols in Molecular Biology, Eds., John Wiley & Sons, Inc. New York, 1995; Remington's Pharmaceutical Sciences, 17th ed., Mack Publishing Co., Easton, Pa., 1985; and Sambrook et al., Molecular cloning: A laboratory manual 2nd edition, Cold Spring Harbor Laboratory Press—Cold Spring Harbor, N.Y., USA, 1989). The nomenclatures used in connection with, and the laboratory procedures and techniques of, molecular and cellular biology, protein biochemistry, enzymology and medicinal and pharmaceutical chemistry described herein are those well-known and commonly used in the art.

[0139] Having generally described this invention, a further understanding of characteristics and advantages of the invention can be obtained by reference to certain specific examples and figures which are provided herein for purposes of illustration only and are not intended to be limiting unless otherwise specified.

### Examples

### Clinical Investigation

[0140] Obese (n=38) and overweight (n=11) subjects, 8 men and 41 women, were recruited for a 12-week controlled dietary intervention at the Center of Research in Human Nutrition, Pitié-Salpêtrière Hospital, Paris, France. The subjects included in the study had no chronic pathology except body weight excess. Their body weight was stable within 3 months prior to the study. No antibiotics or drugs were taken within 2 months before or during the course of the study. The Ethical Committee of Pitié-Salpêtrière Hospital approved the clinical study and subjects gave written informed consent. In the first 6-week phase, subjects consumed an energy restricted high protein diet (1,200 Kcal/d for women and 1,500 for men: 35% proteins, 25% lipids, 44% carbohydrates) with low glycaemic index carbohydrates and enrichment with soluble fibers. This phase was followed by a second 6-week body weight stabilization period with 20% increase in total energy intake, above their resting energy metabolic rate (indirect calorimetry, Deltatrac, Datex, France). At 0, 6 and 12 weeks, blood and fecal samples were collected and anthropometric measurements were performed. Subjects filled a 7-day dietary record and were interviewed by a registered dietitian. On the visit day, the dietitian checked the information and clarified any ambiguities regarding detail of food consumed. All records were analyzed by the registered dietitian using the computer software program PROFILE DOSSIER V3 (Audit Conseil en Informatique Médicale, Bourges, France), which has a dietary database initially made up of 400 food items representative of the French diet as described previously². A nutrient analysis was generated for each subject. Body composition was determined by dual-energy X-ray absorptiometry (DEXA). Blood samples were obtained after 12 hr of fasting to measure total cholesterol, high-density lipoprotein (HDL) cholesterol, triglycerides, insulin, glucose, and inflammatory markers (highly sensitive C-reactive protein (hs-CRP) and interleukin 6 (IL-6)) as previously described³. Insulin resistance was estimated using homeostasis model assessment of insulin resistance (HOMA-IR) and “Disse” index^{4,5}. Subcutaneous abdominal adipose tissue samples were obtained at all time points by needle biopsy from the periumbilical area under local anesthesia (1% xylocaine) for measuring the adipocytes diameter⁶ and for immunohistochemical studies (HAM56+ stained macrophages in adipose tissue). Paired Wilcoxon tests were performed to analyze changes in these variables between various time points (p-value<0.05). P-values were adjusted for multiple testing using the Benjamini-Hochberg procedure⁷.

### Metagenomic Sequencing

[0141] Intestinal bacterial gene content of 49 obese and overweight individuals at 3 time-points (baseline, week 6 and week 12) was determined by high throughput ABI SOLiD sequencing technology of total fecal DNA. An average of 76.5±36.5 (mean±sd) million 35 base-long single reads were determined for each sample (a total of 393 Gb of sequence). By using corona_lite (v4.0r2.0), an average of 24.8±14.3 million reads per individuals were mapped on the reference catalog of 3.3 million genes⁸ with a maximum of 3 mismatches. Reads mapping at multiple positions were discarded and an average of 14.2±8.1 million uniquely mapped reads per individuals were retained for estimating the abundance of each reference gene by using METEOR⁹. Abundance of each gene in an individual was normalized with METEOR by dividing the number of reads that uniquely mapped to the gene of interest by the gene length. After that, normalized gene abundances were transformed in frequencies by dividing them with the total number of uniquely mapped reads for a given sample. The resulting set of gene frequencies, termed as microbial gene profile of an individual, was used for further analyses.

### Differentially Abundant Species Between LGC and HGC

[0142] Two groups of patients with low gene count (LGC) and high gene count (HGC) were defined using the gene richness distribution (FIG. 1a). Genes significantly different in groups of individuals were identified by Mann-Whitney tests, at a p-value threshold of 0.0001. They were clustered by an abundance-based binning strategy, using the covariance of their gene frequency profiles among the individuals of the cohort. Spearman correlations coefficients were determined pairwise and all the genes that correlated above a rho coefficient of 0.85 were assigned to the same cluster. Abundance of a given species in each individual was estimated as a mean abundance of 25 arbitrarily selected ‘tracer’ genes for each cluster. The values were very close to the mean frequency of all the genes of a cluster.

### Receiver-Operator Characteristic (ROC) Analysis

[0143] The analyses were carried out to distinguish between HGC and LGC individuals by a combination of bacterial species. For each combination, only a single decision model was considered, computed as a sum of abundance of species more frequent in HGC than in LGC individuals. As opposed to the infinite number of regression models, such models are finite and can be exhaustively explored. To select the best models, the cross-validated area under the ROC curve (CV-AUC) criterion¹¹ was used, which is well adapted to classification models for binary outcome data.

### Correlations Between Microbial and Clinical Variables

[0144] Mann-Whitney tests were used to compare bioclinical variables, food items and gene clusters between LGC and HGC gene class at each time point. Associations between quantitative basal gene richness and bioclinical/food variables or deltas of bioclinical/food variables were investigated using linear models. For deltas, models were adjusted by the initial values of the variables. A p-value threshold of 0.05 was applied for statistical significance. No adjustment for multiple testing was used due to the highly correlated bioclinical and food variables. However, similar findings obtained in the accompanying paper¹⁰ support the results.

### Taxonomical Annotation

[0145] To obtain a precise and updated taxonomical annotation using BLASTN (BLAST 2.2.24, default parameters), the 3.3 million genes of the reference catalog were compared to the iMOMi database¹² (may 2011 release) containing 3,340 complete and draft microbial genomes downloaded from NCBI databanks. Following taxonomical assignation parameters described by Arumugam¹³, each gene was assigned with the taxonomy of the best-hit covering ≧80% of the gene length and according to the identity threshold for the taxonomic rank (≧65% for phylum, ≧85% for genus and ≧90% for species).

### Results

[0146] Forty-nine obese or overweight subjects were recruited and subjected to a 6-week energy restricted high-protein diet followed by a 6-week weight-maintenance diet the compliance was good, as indicated by a PCA analysis of 35 nutrients over time. Bioclinical characteristics and detailed qualitative and quantitative features of individuals' food intake were obtained at baseline, 6 and 12 weeks. The 35% decrease in energy intake after the first 6-weeks was associated with a reduction in body fat mass, adipocyte diameter and improvements of insulin sensitivity and markers of metabolism and inflammation. During the weight-maintenance phase, intake of nutrients tended to return to baseline values, while dietary total energy, carbohydrate and lipid intake remained lower than at beginning of the of the intervention Serum lipid variables tended to return to their basal levels as well, while a progressive reduction occurred in systemic inflammation markers.

[0147] The gut microbial composition of the study population was examined first at baseline. A bimodal distribution of bacterial gene number was observed (FIG. 1), similar to the one found in a cohort of 292 Danish individuals¹⁰, albeit somewhat less distinct, possibly due to a lower cohort size. At a threshold of 480,000 genes, defined visually and corresponding to that from the accompanying manuscript¹⁰, there were 18 (40%) low gene count (LGC) and 27 (60%) high gene count (HGC) individuals, harboring on average 379,436 and 561,499 genes, respectively, a one third difference. The enterotypes of the individuals in our cohort¹³ were determined. It was found that the Bacteroides- and Ruminococcus-driven enterotypes were prevalent among the LGC and HGC individuals, respectively, whereas the Prevotella-driven enterotype was distributed more uniformly (FIG. 1).

[0148] The baseline phenotypes of the study population were then examined. The LGC group had significantly higher insulin-resistance and fasting serum triglyceride levels, as well as a tendency towards higher inflammation than the HGC group (FIG. 2). It appears that in two European countries, the individuals of the LGC group, who have low gut bacterial richness, present phenotypes which expose them to an increased risk of obesity-associated co-morbidities. Antibiotic treatments, which lower the diversity, have been reported to improve the hormonal, metabolic and inflammatory status of obese mice; this apparent contradiction may be due to a restoration of a balance of the pro- and inflammatory bacterial species in mice. Interestingly, LGC subjects appeared to consume less fruits and vegetables and less fishery products than HGC subjects (Table 7), raising the possibility that the long-term dietary habits may affect gene richness and the associated phenotypes.

[0149] We next searched for the bacterial species differentially abundant in the LGC and the HGC groups. To this aim, the genes that had significantly different frequencies in the LGC and HGC groups were first identified. The genes from the same species were then clustered by a frequency-based covariance analysis, the genes that vary in a coordinated way are likely to belong to the same species¹⁰. 6,230 genes were identified that were different at Mann-Whitney p<0.0001; 4,462 (72%) were grouped into 112 clusters containing at least 2 genes at a Spearman correlation coefficient >0.85. A vast majority of these genes (3,966; 89%) were found in only 18 clusters, which are likely to originate from species differentially abundant in the LGC and HGC groups. Only two (Faecalibacterium prausnitzii and Roseburia inulinivorans) had a clear taxonomic assignment. The relative abundance of the 18 species in each individual was computed as a median frequency of their genes; all were significantly more abundant among the HGC individuals (FIG. 1).

[0150] To test whether the LGC and HGC individuals could be distinguished by the 18 species, an exhaustive ROC analysis of all species combinations was carried out, with 10-fold cross validation, using 90% of individuals for computation and the remaining 10% for test. The best AUC values for combination of different numbers of species are shown in FIG. 1; they ranged between 0.96 and 0.99 for 2 to 9 species combinations, indicating an almost perfect stratification of LGC and HGC individuals.

[0151] Interestingly, 14 of the 18 species (78%) were also identified as differentially abundant among the LGC and HGC individuals in a larger Danish cohort¹¹. Not surprisingly, the species combinations yielding the best AUC values for our cohort also efficiently stratified LGC and HGC Danes (FIG. 1). This indicates that the LGC and HGC individuals from two European countries differ in a similar way, not only by their clinical phenotypes but also by specific features of their gut microbiota.

[0152] Very interestingly, gene richness increased significantly in the LGC group after the energy-restricted diet and remained higher than at the baseline after the stabilization phase, even if a slight downwards trend was apparent, whereas it did not change significantly during intervention in the HGC group. Thus, a dietary intervention can correct a putative loss of richness in the LGC group, albeit partially, as the difference between the LGC and HGC groups remained significant at the end of the intervention. The intervention led to an improvement of metabolic variables in LGC individuals, bringing them closer to that of the HGC individuals: the tendency towards higher insulin resistance disappeared while the difference in triglyceride levels was attenuated (FIG. 2). Importantly, although the inflammation was decreased in all individuals, the difference between LGC and HGC individuals was not attenuated (FIG. 2).

[0153] To investigate the correlations between gene richness and dietary intervention further, those were studied in a quantitative way. For this purpose, we downsized the data set to 4.5 million uniquely mapping reads, enabling us to include at each time point 45 individuals. Prior to dietary intervention, gene richness was not related to age, sex, and BMI, but was associated with higher consumption of fruits and vegetables and lower triglyceride and cholesterol levels, confirming the LGC/HGC group comparisons. After 6 weeks of low-calorie diet, subjects with high gene richness at baseline had lower insulin-resistance and serum triglycerides as well as diminished adipose tissue inflammatory cells than the subjects with lower gene richness; the difference was significant for triglycerides and systemic inflammation after the weight maintenance phase, at 12 weeks. These observations indicate that gene richness affects the efficacy of the dietary intervention, even if the difference between the LGC and HGC individuals was globally attenuated. This conclusion was strengthened by the associations between higher gene richness at baseline and better improvement of adipose tissue and systemic inflammation (delta changes at 6 and 12 weeks, respectively). Gene richness appears to be predictive of the efficacy of dietary intervention in overweight/obese individuals.

TABLE 2
AUC obtained when determining low gut diversity by
detecting the presence or absence of 25 bacterial
genes from the given bacterial species.

| bacterial species | AUC |
|---|---|
| MO_HL_5 | 0.890946502057613 |
| MO_HL_6 | 0.890946502057613 |
| MO_HL_14 | 0.872427983539095 |
| MO_HL_9 | 0.845679012345679 |
| MO_HL_11 | 0.843621399176955 |
| MO_HL_13 | 0.831275720164609 |
| MO_HL_3 | 0.82716049382716 |
| MO_HL_8 | 0.826131687242798 |
| MO_HL_16 | 0.825102880658436 |
| MO_HL_4 | 0.820987654320988 |
| MO_HL_17 | 0.812757201646091 |
| MO_HL_1 | 0.808641975308642 |
| MO_HL_7 | 0.800411522633745 |
| MO_HL_12 | 0.79835390946502 |
| MO_HL_2 | 0.777777777777778 |
| MO_HL_10 | 0.765432098765432 |
| MO_HL_15 | 0.742798353909465 |
| MO_HL_18 | 0.740740740740741 |

TABLE 3
AUC above 0.9 are obtained when determining low gut diversity by detecting the
presence or absence of 25 bacterial genes from the given combination of 2 bacterial species.

| Combination of bacterial | | Combination of bacterial | |
|---|---|---|---|
| species | AUC | species | AUC |
| MO_HL_5 and MO_HL_6 | 0.948559670781893 | MO_HL_3 and MO_HL_13 | 0.874485596707819 |
| MO_HL_11 and MO_HL_12 | 0.948559670781893 | MO_HL_13 and MO_HL_14 | 0.874485596707819 |
| MO_HL_6 and MO_HL_7 | 0.94238683127572 | MO_HL_14 and MO_HL_15 | 0.874485596707819 |
| MO_HL_5 and MO_HL_11 | 0.938271604938272 | MO_HL_14 and MO_HL_17 | 0.874485596707819 |
| MO_HL_6 and MO_HL_8 | 0.932098765432099 | MO_HL_4 and MO_HL_8 | 0.872427983539095 |
| MO_HL_7 and MO_HL_11 | 0.932098765432099 | MO_HL_4 and MO_HL_14 | 0.872427983539095 |
| MO_HL_4 and MO_HL_13 | 0.92798353909465 | MO_HL_9 and MO_HL_15 | 0.872427983539094 |
| MO_HL_5 and MO_HL_12 | 0.921810699588477 | MO_HL_1 and MO_HL_3 | 0.87037037037037 |
| MO_HL_6 and MO_HL_13 | 0.921810699588477 | MO_HL_1 and MO_HL_5 | 0.87037037037037 |
| MO_HL_13 and MO_HL_17 | 0.919753086419753 | MO_HL_1 and MO_HL_13 | 0.868312757201646 |
| MO_HL_5 and MO_HL_17 | 0.91358024691358 | MO_HL_3 and MO_HL_16 | 0.868312757201646 |
| MO_HL_6 and MO_HL_12 | 0.91358024691358 | MO_HL_11 and MO_HL_15 | 0.868312757201646 |
| MO_HL_5 and MO_HL_7 | 0.911522633744856 | MO_HL_13 and MO_HL_15 | 0.864197530864198 |
| MO_HL_5 and MO_HL_8 | 0.909465020576132 | MO_HL_3 and MO_HL_12 | 0.864197530864197 |
| MO_HL_8 and MO_HL_11 | 0.909465020576132 | MO_HL_5 and MO_HL_9 | 0.864197530864197 |
| MO_HL_3 and MO_HL_9 | 0.907407407407407 | MO_HL_6 and MO_HL_9 | 0.864197530864197 |
| MO_HL_5 and MO_HL_13 | 0.907407407407407 | MO_HL_7 and MO_HL_18 | 0.864197530864197 |
| MO_HL_14 and MO_HL_16 | 0.905349794238683 | MO_HL_2 and MO_HL_15 | 0.863168724279835 |
| MO_HL_12 and MO_HL_13 | 0.904320987654321 | MO_HL_1 and MO_HL_11 | 0.862139917695473 |
| MO_HL_2 and MO_HL_7 | 0.901234567901235 | MO_HL_3 and MO_HL_6 | 0.862139917695473 |
| MO_HL_2 and MO_HL_14 | 0.89917695473251 | MO_HL_8 and MO_HL_17 | 0.862139917695473 |
| MO_HL_4 and MO_HL_5 | 0.89917695473251 | MO_HL_13 and MO_HL_18 | 0.862139917695473 |
| MO_HL_11 and MO_HL_17 | 0.89917695473251 | MO_HL_7 and MO_HL_9 | 0.860082304526749 |
| MO_HL_4 and MO_HL_11 | 0.898148148148148 | MO_HL_8 and MO_HL_18 | 0.860082304526749 |
| MO_HL_7 and MO_HL_12 | 0.896090534979424 | MO_HL_9 and MO_HL_16 | 0.860082304526749 |
| MO_HL_1 and MO_HL_7 | 0.895061728395062 | MO_HL_1 and MO_HL_17 | 0.858024691358025 |
| MO_HL_1 and MO_HL_8 | 0.895061728395062 | MO_HL_5 and MO_HL_15 | 0.858024691358025 |
| MO_HL_8 and MO_HL_12 | 0.895061728395062 | MO_HL_3 and MO_HL_10 | 0.858024691358024 |
| MO_HL_2 and MO_HL_5 | 0.893004115226337 | MO_HL_1 and MO_HL_15 | 0.8559670781893 |
| MO_HL_2 and MO_HL_13 | 0.893004115226337 | MO_HL_9 and MO_HL_10 | 0.8559670781893 |
| MO_HL_3 and MO_HL_14 | 0.893004115226337 | MO_HL_8 and MO_HL_13 | 0.854938271604938 |
| MO_HL_6 and MO_HL_11 | 0.890946502057613 | MO_HL_2 and MO_HL_16 | 0.853909465020576 |
| MO_HL_9 and MO_HL_14 | 0.890946502057613 | MO_HL_8 and MO_HL_9 | 0.853909465020576 |
| MO_HL_6 and MO_HL_17 | 0.888888888888889 | MO_HL_4 and MO_HL_18 | 0.851851851851852 |
| MO_HL_2 and MO_HL_4 | 0.887860082304527 | MO_HL_9 and MO_HL_12 | 0.851851851851852 |
| MO_HL_4 and MO_HL_6 | 0.886831275720165 | MO_HL_9 and MO_HL_17 | 0.851851851851852 |
| MO_HL_7 and MO_HL_13 | 0.885802469135803 | MO_HL_10 and MO_HL_13 | 0.849794238683127 |
| MO_HL_4 and MO_HL_7 | 0.885802469135802 | MO_HL_11 and MO_HL_18 | 0.849794238683127 |
| MO_HL_2 and MO_HL_6 | 0.88477366255144 | MO_HL_1 and MO_HL_2 | 0.847736625514403 |
| MO_HL_2 and MO_HL_8 | 0.88477366255144 | MO_HL_3 and MO_HL_17 | 0.847736625514403 |
| MO_HL_2 and MO_HL_9 | 0.88477366255144 | MO_HL_1 and MO_HL_6 | 0.845679012345679 |
| MO_HL_3 and MO_HL_7 | 0.88477366255144 | MO_HL_3 and MO_HL_18 | 0.845679012345679 |
| MO_HL_3 and MO_HL_8 | 0.88477366255144 | MO_HL_4 and MO_HL_9 | 0.845679012345679 |
| MO_HL_6 and MO_HL_15 | 0.88477366255144 | MO_HL_8 and MO_HL_15 | 0.845679012345679 |
| MO_HL_9 and MO_HL_13 | 0.88477366255144 | MO_HL_1 and MO_HL_16 | 0.843621399176955 |
| MO_HL_1 and MO_HL_9 | 0.882716049382716 | MO_HL_3 and MO_HL_11 | 0.843621399176954 |
| MO_HL_2 and MO_HL_3 | 0.882716049382716 | MO_HL_12 and MO_HL_17 | 0.842592592592593 |
| MO_HL_2 and MO_HL_11 | 0.882716049382716 | MO_HL_2 and MO_HL_12 | 0.842592592592592 |
| MO_HL_10 and MO_HL_14 | 0.882716049382716 | MO_HL_2 and MO_HL_17 | 0.84156378600823 |
| MO_HL_11 and MO_HL_13 | 0.882716049382716 | MO_HL_7 and MO_HL_10 | 0.84156378600823 |
| MO_HL_3 and MO_HL_4 | 0.880658436213992 | MO_HL_1 and MO_HL_12 | 0.839506172839506 |
| MO_HL_5 and MO_HL_18 | 0.880658436213992 | MO_HL_3 and MO_HL_5 | 0.839506172839506 |
| MO_HL_7 and MO_HL_8 | 0.880658436213992 | MO_HL_3 and MO_HL_15 | 0.837448559670782 |
| MO_HL_7 and MO_HL_17 | 0.880658436213992 | MO_HL_7 and MO_HL_15 | 0.83641975308642 |
| MO_HL_9 and MO_HL_11 | 0.878600823045268 | MO_HL_6 and MO_HL_18 | 0.835390946502058 |
| MO_HL_6 and MO_HL_14 | 0.878600823045267 | MO_HL_7 and MO_HL_16 | 0.835390946502058 |
| MO_HL_1 and MO_HL_14 | 0.876543209876543 | MO_HL_8 and MO_HL_16 | 0.835390946502058 |
| MO_HL_5 and MO_HL_14 | 0.876543209876543 | MO_HL_13 and MO_HL_16 | 0.835390946502058 |
| MO_HL_7 and MO_HL_14 | 0.876543209876543 | MO_HL_4 and MO_HL_16 | 0.835390946502057 |
| MO_HL_8 and MO_HL_14 | 0.876543209876543 | MO_HL_8 and MO_HL_10 | 0.835390946502057 |
| MO_HL_9 and MO_HL_18 | 0.876543209876543 | MO_HL_6 and MO_HL_10 | 0.833333333333333 |
| MO_HL_11 and MO_HL_14 | 0.876543209876543 | MO_HL_6 and MO_HL_16 | 0.833333333333333 |
| MO_HL_12 and MO_HL_14 | 0.876543209876543 | MO_HL_10 and MO_HL_16 | 0.833333333333333 |
| MO_HL_14 and MO_HL_18 | 0.876543209876543 | MO_HL_11 and MO_HL_16 | 0.833333333333333 |
| MO_HL_2 and MO_HL_10 | 0.874485596707819 | MO_HL_1 and MO_HL_4 | 0.831275720164609 |
| | | MO_HL_15 and MO_HL_17 | 0.831275720164609 |

TABLE 4
AUC above 0.95 are obtained when determining low gut diversity
by detecting the presence or absence of 25 bacterial genes from
the given combination of 3 bacterial species.

| Combination of bacterial species | AUC |
|---|---|
| MO_HL_7, MO_HL_11 and MO_HL_12 | 0.993827160493827 |
| MO_HL_5, MO_HL_11 and MO_HL_12 | 0.977366255144033 |
| MO_HL_8, MO_HL_11 and MO_HL_12 | 0.967078189300411 |
| MO_HL_4, MO_HL_7 and MO_HL_11 | 0.965020576131687 |
| MO_HL_5, MO_HL_7 and MO_HL_11 | 0.965020576131687 |
| MO_HL_7, MO_HL_11 and MO_HL_17 | 0.958847736625514 |
| MO_HL_5, MO_HL_6 and MO_HL_8 | 0.954732510288066 |
| MO_HL_7, MO_HL_12 and MO_HL_13 | 0.954732510288066 |
| MO_HL_5, MO_HL_6 and MO_HL_12 | 0.952674897119342 |
| MO_HL_6, MO_HL_7 and MO_HL_12 | 0.952674897119342 |
| MO_HL_7, MO_HL_8 and MO_HL_11 | 0.952674897119342 |
| MO_HL_4, MO_HL_5 and MO_HL_11 | 0.950617283950617 |
| MO_HL_6, MO_HL_8 and MO_HL_11 | 0.950617283950617 |

TABLE 5
AUC above 0.96 are obtained when determining low gut diversity by detecting the
presence or absence of 25 bacterial genes from the given combination of 4 bacterial species

| Combination of bacterial species | AUC |
|---|---|
| MO_HL_5, MO_HL_7, MO_HL_11 and MO_HL_12 | 0.987654320987654 |
| MO_HL_7, MO_HL_8, MO_HL_11 and MO_HL_12 | 0.981481481481482 |
| MO_HL_7, MO_HL_11, MO_HL_12 and MO_HL_17 | 0.981481481481481 |
| MO_HL_6, MO_HL_8, MO_HL_11 and MO_HL_12 | 0.977366255144033 |
| MO_HL_2, MO_HL_7, MO_HL_11 and MO_HL_12 | 0.975308641975309 |
| MO_HL_7, MO_HL_11, MO_HL_12 and MO_HL_15 | 0.975308641975309 |
| MO_HL_2, MO_HL_8, MO_HL_11 and MO_HL_2 | 0.973251028806584 |
| MO_HL_5, MO_HL_11, MO_HL_12 and MO_HL_17 | 0.973251028806584 |
| MO_HL_6, MO_HL_7, MO_HL_11 and MO_HL_12 | 0.973251028806584 |
| MO_HL_5, MO_HL_8, MO_HL_11 and MO_HL_12 | 0.97119341563786 |
| MO_HL_8, MO_HL_11, MO_HL_12 and MO_HL_17 | 0.97119341563786 |
| MO_HL_7, MO_HL_11, MO_HL_12 and MO_HL_13 | 0.969135802469136 |
| MO_HL_5, MO_HL_6, MO_HL_8 and MO_HL_11 | 0.967078189300411 |
| MO_HL_7, MO_HL_8, MO_HL_11 and MO_HL_17 | 0.967078189300411 |
| MO_HL_2, MO_HL_5, MO_HL_11 and MO_HL_12 | 0.965020576131687 |
| MO_HL_4, MO_HL_7, MO_HL_11 and MO_HL_12 | 0.965020576131687 |
| MO_HL_5, MO_HL_7, MO_HL_8 and MO_HL_11 | 0.965020576131687 |
| MO_HL_7, MO_HL_8, MO_HL_12 and MO_HL_13 | 0.965020576131687 |
| MO_HL_7, MO_HL_12, MO_HL_13 and MO_HL_17 | 0.965020576131687 |
| MO_HL_2, MO_HL_4, MO_HL_7 and MO_HL_11 | 0.962962962962963 |
| MO_HL_2, MO_HL_7, MO_HL_8 and MO_HL_13 | 0.962962962962963 |
| MO_HL_2, MO_HL_7, MO_HL_12 and MO_HL_13 | 0.962962962962963 |
| MO_HL_4, MO_HL_5, MO_HL_7 and MO_HL_11 | 0.962962962962963 |
| MO_HL_5, MO_HL_6, MO_HL_12 and MO_HL_13 | 0.962962962962963 |
| MO_HL_5, MO_HL_11, MO_HL_12 and MO_HL_13 | 0.962962962962963 |
| MO_HL_6, MO_HL_8, MO_HL_12 and MO_HL_13 | 0.962962962962963 |
| MO_HL_2, MO_HL_7, MO_HL_8 and MO_HL_11 | 0.960905349794239 |
| MO_HL_5, MO_HL_6, MO_HL_7 and MO_HL_8 | 0.960905349794239 |
| MO_HL_5, MO_HL_6, MO_HL_11 and MO_HL_12 | 0.960905349794239 |
| MO_HL_6, MO_HL_7, MO_HL_8 and MO_HL_11 | 0.960905349794239 |
| MO_HL_6, MO_HL_7, MO_HL_8 and MO_HL_12 | 0.960905349794239 |
| MO_HL_6, MO_HL_7, MO_HL_12 and MO_HL_13 | 0.960905349794239 |
| MO_HL_7, MO_HL_8, MO_HL_11 and MO_HL_15 | 0.960905349794239 |
| MO_HL_11, MO_HL_12, MO_HL_13 and MO_HL_17 | 0.960905349794239 |

TABLE 6
bacterial species and combinations of 2 to 18 bacterial species giving the best AUC
in the method of the invention.

| Bacterial species and combination thereof | AUC |
|---|---|
| MO_HL_5 | 0.890946502 |
| MO_HL_12 and MO_HL_11 | 0.948559671 |
| MO_HL_11, MO_HL_7 and MO_HL_12 | 0.99382716 |
| MO_HL_11, MO_HL_5, MO_HL_7 and MO_HL_12 | 0.987654321 |
| MO_HL_11, MO_HL_8, MO_HL_12, MO_HL_7 and MO_HL_2 | 0.983539095 |
| MO_HL_17, MO_HL_5, MO_HL_12, MO_HL_7, MO_HL_11and MO_HL_8 | 0.981481481 |
| MO_HL_12, MO_HL_11, MO_HL_2, MO_HL_5, MO_HL_8, MO_HL_13 | 0.983539095 |
| and MO_HL_7 | |
| MO_HL_12, MO_HL_2, MO_HL_17, MO_HL_11, MO_HL_13, MO_HL_5, | 0.983539095 |
| MO_HL_8 and MO_HL_7 | |
| MO_HL_4, MO_HL_11, MO_HL_6, MO_HL_13, MO_HL_2, MO_HL_8, | 0.979423868 |
| MO_HL_12, MO_HL_7 and MO_HL_17 | |
| MO_HL_8, MO_HL_11, MO_HL_6, MO_HL_4, MO_HL_13, MO_HL_5, | 0.981481481 |
| MO_HL_2, MO_HL_7, MO_HL_17 and MO_HL_12 | |
| MO_HL_5, MO_HL_13, MO_HL_4, MO_HL_12, MO_HL_15, MO_HL_17, | 0.977366255 |
| MO_HL_6, MO_HL_2, MO_HL_8, MO_HL_7 and MO_HL_11 | |
| MO_HL_11, MO_HL_6, MO_HL_17, MO_HL_4, MO_HL_3, MO_HL_12, | 0.975308642 |
| MO_HL_5, MO_HL_10, MO_HL_8, MO_HL_7, MO_HL_2 and MO_HL_13 | |
| MO_HL_18, MO_HL_15, MO_HL_11, MO_HL_10, MO_HL_5, MO_HL_4, | 0.973251029 |
| MO_HL_6, MO_HL_8, MO_HL_12, MO_HL_7, MO_HL_2, MO_HL_13 and | |
| MO_HL_3 | |
| MO_HL_6, MO_HL_17, MO_HL_3, MO_HL_2, MO_HL_4, MO_HL_18, | 0.971193416 |
| MO_HL_5, MO_HL_13, MO_HL_10, MO_HL_15, MO_HL_7, MO_HL_1, | |
| MO_HL_8 and MO_HL_12 | |
| MO_HL_10, MO_HL_18, MO_HL_2, MO_HL_13, MO_HL_7, MO_HL_1, | 0.971193416 |
| MO_HL_11, MO_HL_3, MO_HL_4, MO_HL_15, MO_HL_5, MO_HL_6, | |
| MO_HL_17, MO_HL_12 and MO_HL_8 | |
| MO_HL_7, MO_HL_4, MO_HL_13, MO_HL_1, MO_HL_5, MO_HL_6, | 0.946502058 |
| MO_HL_11, MO_HL_12, MO_HL_8, MO_HL_3, MO_HL_18, MO_HL_2, | |
| MO_HL_10, MO_HL_17, MO_HL_15 and MO_HL_9 | |
| MO_HL_10, MO_HL_8, MO_HL_1, MO_HL_16, MO_HL_18, MO_HL_5, | 0.942386831 |
| MO_HL_15, MO_HL_2, MO_HL_7, MO_HL_6, MO_HL_13, MO_HL_11, | |
| MO_HL_17, MO_HL_3, MO_HL_14, MO_HL_4 and MO_HL_12 | |
| MO_HL_15, MO_HL_17, MO_HL_4, MO_HL_14, MO_HL_16, MO_HL_10, | 0.940329218 |
| MO_HL_7, MO_HL_6, MO_HL_11, MO_HL_9, MO_HL_5, MO_HL_3, | |
| MO_HL_8, MO_HL_1, MO_HL_12, MO_HL_18, MO_HL_13 and MO_HL_2 | |

### REFERENCES

[0154] 1. Rizkalla, S. W. et al. Differential effects of macronutrient content in 2 energy-restricted diets on cardiovascular risk factors and adipose tissue cell size in moderately obese individuals: a randomized controlled trial. Am. J. Clin. Nutr. 95, 49-63 (2012).
[0155] 2. Bouché, C. et al. Five-week, low-glycemic index diet decreases total fat mass and improves plasma lipid profile in moderately overweight nondiabetic men. Diabetes Care 25, 822-828 (2002).
[0156] 3. Tordjman, J. et al. Structural and inflammatory heterogeneity in subcutaneous adipose tissue: Relation with liver histopathology in morbid obesity. Journal of Hepatology (2012).doi:10.1016/j.jhep.2011.12.015
[0157] 4. Disse, E. et al. A lipid-parameter-based index for estimating insulin sensitivity and identifying insulin resistance in a healthy population. Diabetes Metab. 34, 457-463 (2008).
[0158] 5. Antuna-Puente, B. et al. Evaluation of insulin sensitivity with a new lipid-based index in non-diabetic postmenopausal overweight and obese women before and after a weight loss intervention. Eur. J. Endocrinol. 161, 51-56 (2009).
[0159] 6. Prat-Larquemin, L. et al. Adipose angiotensinogen secretion, blood pressure, and AGT M235T polymorphism in obese patients. Obes. Res. 12, 556-561 (2004).
[0160] 7. Benjamini, Y. & Hochberg, Y. Controlling the false discovery rate: a practical and powerful approach to multiple testing. Journal of the Royal Statistical Society. Series B. Methodological 57, 289-300
[0161] 8. Qin, J. et al. A human gut microbial gene catalogue established by metagenomic sequencing. Nature 464, 59-65 (2010).
[0162] 9. Pons, N. et al. METEOR, a platform for quantitative metagenomic profiling of complex ecosystems. JOBIM (2010).
[0163] 10. Le Chatelier, E. et al. Richness of human gut microbial communities correlates with metabolic markers. submitted in Nature
[0164] 11. Jiang, D., Huang, J. & Zhang, Y. The Cross-Validated AUC for MCP-Logistic Regression with High-Dimensional Data. Stat Methods Med Res (2011).doi:10.1177/0962280211428385
[0165] 12. Pons, N., Batto, J.-M., Ehrlich, S. D. & Renault, P. Development of software facilities to characterize regulatory binding motifs and application to streptococcaceae. J. Mol. Microbiol. Biotechnol. 14, 67-73 (2008).
[0166] 13. Arumugam, M. et al. Enterotypes of the human gut microbiome. Nature 473, 174-180 (2011).

The application's sequence listing, which the Patent Office published only in electronic form, follows.

SEQUENCE LISTING (450 sequences)

SEQ ID NO: 1 - DNA, 1713 bp, Unknown
  Unknown gut bacteria
atgacaccatcagaatggagtttccgtatgaaacacacgttgaaaatactgatcccgatcctgctgatccttgcgctgctgatcggcgcgtgctggtttttcctcatcgcccgccgcgatctgacggagagcgtgtttacctactggggcaatcatttttataacaacggccgctacggccgcgccatcacctgctacaagctcgccatgcacttcgccccgaaggacgccgagcttgccatctggctctcgaacgcttacaaacggagcggcaactatacgaaggccgaatataccctcgtcaacgccatcacgcagagccccgacgcggccgacctctacatcgccctgtccaagacctacgtggagcaggacaacctccttgacgccgagaccatgctctgccgcatcaccaacgacgccgtccgcacccagatcgacgccctgcgccccgccgcacccgtgatcgagccggagagcggcacctatacggaatacatcgatgtcaccatcaccgggaccgagggcaccgtctacgccgtctgcaacagcgatttcccggccgaggagacggacatctataccggccccatctccctgaccgcgggcgagagcaagatcgtcgcgctgagcgtggcggaaaacggcctcgtgagcgacgcggtctacgccggctataccgtcggcagcgtcgtggagccggtcacgctggcggacgcggggctggacagctatgtccgtgagctgctcggcaagacggctggcagcacgctgatgacggacgagctctgggccatcgaggagctggacctgcccgataccgtcgcctcgctggaggatctgccgtacttcaccggcctgcgcacgctcgcgctgcaccatagcagcgcgtcgatggacctgtcggtcctcgcccagctgccgacgctgcgcacgctggacctgtccggctgcacgctctcgtcggcggcgatgagcaccatcgtctcactgccggagctgacgagcctgaacctctccggctgcgccgtcatcgacatcaacgccctgattggcctgcagaagctggaattcctcgacctttccaacaacaccatctccgacctcaccgccctgtccgccctgcaggcgctcaaggagctgcatctgaccaacaaccccatcacctcgctcgccaacctcaaaaactgcacgcagctggagatcctctacgcgaaccagtgctccatcacgcgcatcgcgggcctggccgaccatacggcgctcaaggagctgtatctggccaacaaccagatcgcggatatctccgtcctcgcctcctgcacggcgctgcagacgctggacctgtcgttcaacgcggtcacggatatctccatcgtttccgagctcaggcagctggtcgacctcaacgtgagcaacaaccagatcaccgtcttcccggctgtggacgccgatacgccgctctggcacgtcgatatcagccacaaccagatcgaggatctgaccggccttgcgggcaacctctccgtcaacttcatcaacgccgactataataagatcaagtccatcgcaaagctcgaggcgtgcgtcatgctcgttaagatgaacctctgggataaccccgtgaacaccgacgaggtcaagaagctgcaggacgtcggcatcatcatcaactataaccccgaatacaaggaaacggacacagaagcctga

SEQ ID NO: 2 - DNA, 1746 bp, Unknown
  Unknown gut bacteria
atgatcaaacgtttggcggcctgtatccgggaatacaaaaggccgacgatcctgacccccgtgtgcatggtgggcgaggtcgtatgcgagtgcacgatcccgctgctgacggcggatctgatcaacgcgatccagaacggctgcacgatgcagaccattctgtccttcggactcaagctgttcgtcatcgccatgctgtcgctggggttcggatcgttgtccggctggttcgcggcagaggccgcggcgggctttgcgaagaatctgcggcatgatctgtattatcaggtgcagggcttttcctttgcgaacatcgaccggttttcgacctcgtcgctcgtcacgcggctgacgacggacgtcacgaacatccagaacgcgttcatgatgtgcatccgcatcgcggtgcgcgcgccgatgatgctggtgttcgcggtggtgatgtccgtccgcgtgggcaagcagctggcgctcatcttcgccgggatcgtgccggtgctggggttcgcgctgtttctgatgatccggagcgcgctgccgctgttcaaggcggtcttcaagaaatacgacgcgctcaaccactccgtgcaggagaacgtgcaggccatgcgcgtggtcaagagcttcgtgcgcgaggactatgagacggagaaattctccgccgcctccgactccgtgcggaaggatttcctcaaggcggagaaaatcctggcgctcaactcccctgccatgcagttctgcgtgtacacgtcgatgatcctcatctcgtatttcgcggcgaagctcatcgtcacgtcgggcggaacgtatctgggcgtgggaagtctgacgagcatgatcacgtattccatgcagatcctcatgagcctgatgatgctctcgatgatcttcgtgatgctgacgatggcgcaggcctccggcaagcgcatctgcgaggtgctcgacgagacgagcagcctgcagaacccggcagagccggtctatgatgtgaagaacggcgacgtggattttgaccatgtcaactttaagtattcggcggcggcgaagcgcagcgcgctttcggacgttgatttccatgtgagatccggccagaccgtcggcatcattggcggcacggggtcttctaagacgagtctggtgcagctcatctgccggctgtacgacgtgacggacggcagcgtgcgggtcggcggcgtggacgtgcggcagtacgatctggagacgctgcgcaaccaggtcgcggtcgtgctgcagaagaacgtgctgttctccggcacgatcaaggagaatctgcgctggggcgacgcgaacgcgtcggacgaggagctgcagcgggcctgcgagctggcgtgcgcggatgaattcatccagcagatgccggacaaatacgacacctatatcgagcagggcggcacgaacgtcggcggcgggcagaagcagcggctgtgcatcgcgcgggcgctgctgaaaaagccgaagattttgatcctcgacgactcgacctccgctgtcgacacgaagaccgacgcgaagatccgcgcggcgctgcgctcggagatcccggagacgacgaagttcatcatcgcgcagcggatctcgtccatccagaacgcggatctcatcctcgtgctcgagggcgggcagatcgacgccatgggcacgcacgagcagctgctggcttcgaaccggatctaccgggaagtctatgaatctcagaacaaggcgggaggtgctgacaatggctaa

SEQ ID NO: 3 - DNA, 1251 bp, Unknown
  Unknown gut bacteria
atgaaaatcaaaaatgttgtctgcgcaccaggacgtaccggcttctattttgacgatcagcgcgcgatcaagcgcggcgcggggcacgacgggatgttctatatcggtcagcctgtcaccgagggcttttccgccgtccgtcaggcaggcgaggcgatctcggtcatgctgatcctggaggacggccaggtcgcttacggcgactgcgcggcggtacagtattccggcgcaggcgggcgcgatccgctgtttttggcgaaggattttattcctattattgagcagtacatcaaaccgtgtctggttggccaggaagcggacaatttccgtgcgcttgccgcaaggatggaagccatcgaggtcggcggcaagcggctgcatacggcgatccgctatggtgtttctcaggcgctgcttgacgccgttgcaaaggcgagcgggcgcatgatgtgtgaggtcgtggcggatgaatacggctgcacggtatcggatcacctgattccgatctttacccagtccggggacgaccggtatgataatgcggacaaaatgatcatcaagggcgcgcaggtgctcccgcacgcattgatcaacaacggggagacgaagctcggcgcgcacggcgaaaagcttcaggagtatgtggcgtggcttcgtgaccggatcttggcgcagcgtctggacgagcactatgccccggtcctgcatatcgatgtctacggtacgatcggcgcagccttcggaaatcataactacgcagccatggcggattatctggcggtcctggagcagaccgcaaagccgttccacctgcggatcgaaggaccgatggactgcgactgtgaccgcgaaacgcagatggaggcgctcgcggggctgaccgcggagctggaccggcgcggcatcgatgttgagctggtcgctgacgaatggtgcaatacgctcgaagatatcaagcttttcgccgatcacaaagccggtcacatgatccagatcaaaacgccggatctcggcggcatcaacaataccatcgaggcagtcctctactgcaaggaaaagggcatcggtgcatatcagggcggcacctgcaatgagaccgaccgctctgcgcaggtctgcgtgcagtgcgccatggcgacacagccggcacagatcctcgcaaagcccggcatgggtgtggacgaaggctatatgatcgtctataacgagatgaaccggatcctcgcgctgcggaaggcaaaggcagaataa

SEQ ID NO: 4 - DNA, 990 bp, Unknown
  Unknown gut bacteria
atgcagaaggagcaggttatcatgcgcggaatcccgtctttgatcacagagatccgaaagaaagtctttaccgaggtcgcccggatggcatactccggcgactacaccgatatggaggatatccccttcaagatcgtccccggccagagcccgctgcaccgcgaatcggtctttcttgagcgcgccatcgcgggcgaacgcgtgcgtcttgcgatgggtctgtccctgcagcccgtacagacgcgcacgcttctgaccgagggcatggaccaggccgccatcgccgagcagtattacgagccgccgctcgtcaacatcatcccctacgcctgccacgcctgcccgacgcggcagtaccgtgtcaacgagctgtgtcagggctgtctcgcctcctcgtgccagcgcgtgtgcccgaagggcgcgatcaaatttgtcaacggcaagagccgcatcgaccagaaactgtgcatcaagtgcggcaaatgcgccagatcctgtccgtacaacgccatcacctacctcgagcgcccgtgtcaggccgcctgcggcatggacgccatcggcgtcgacgaatacggcaaggcctgcatcgactatgaccgctgcgtctcctgcggccagtgccttgtgagctgcccgttcggcgcgatcgtcgacaagagccagatctatcaggtcatccgctccatgctcgagggcaacgaggtcgtggccatcgtcgcgccgtcgttcgtcggccagttcggcaaggacgtgaccgtgccgaagttcctcacggccatgaagcagctcggctttgccgatgtggtcgaggtcgcggtcggcgcggatatctgcacgatcgaggaagcgcgggactttatggaaaaggtcccggaggagcagcggttcatggcgacctcctgctgcccgtcgtggcggatgatggccagacggctgttccccgccgaatccggcaacatttccatgacctacacgccgatggtctat

SEQ ID NO: 5 - DNA, 1221 bp, Unknown
  Unknown gut bacteria
aaaaagatcatcgcattgctgcttgcagcgatcatggtgctcggtctggctgcctgcgcatccaagacggagcccgagaccaccaccgaaccggaaaccaccaccgaaaccgctcccgagaccacggaagaacccgccgctgaggagcccgcagctgaagaagagaccccggctgaagagcccgctgccgacgctgcttactccgtcgccatgatcaccgactacggtgataccaccgaccagtccttcaaccagaccacctacgaggcctgcaaggagttctgcgaggccaacggcctgcagtttaactatttcaagcccgccggtgactccgacgccgagcgtgtcgccatgatcgagtccgcgatcgacgagggctacaacgttgttgtgatgcccggctacgctttcgcaggcgccatcaaggaaactgccgacatctatcccgaggtcaccttcattgcgctggacgtcagtgccggcgatctgggcgatgactacaccctgcccgccaacctctactgcgctgtctatcaggaagagctgtgcggctacatggccggctacgcagctgtgaagctccgctacaccaagcgcggactcctgggcggcatggctgtccccgctgttgtccgttacggcttcggctatgtgcagggcgttgacgctgctgccaaggagctcggcatcacggtcgacctcaagtacgcttacggcaaccagttcgttggcgacgctgacatcaccgctgcaatggacacctggtatcagggcggcacggagattgtcttcgcctgcggcggcggcatctatacctccgcggctgaggctgctgccaaggtcggcggcaagatcatcggcgtcgacgttgaccaggccggcatcatcgacggcgattacggcgaaggcatgaccgttacctccgcaatgaagggccttgctcccaccgtcaagcatctgctctccgaagtcgtggccggcaactttgccaactacggcggcaagatcgaaacgctgggcctcgtctccgccaacccggaagagaactacgtccagatcccgaccgcttccacgcagttcgaagacggcaagttcacccaggctgactacgaagcgctcgtcgctgccatgttcgccggcgatgtcaccgtctccaacgacatcacggctatgcccgctgtcaccaacgtcaccgttgaggacttcggcaacctgaagtaa

SEQ ID NO: 6 - DNA, 1446 bp, Unknown
  Unknown gut bacteria
atgaataagcgggcgatcgtctatgtgctgggcgcggtgctgctgatcggggccgcgctgatgctgccgccgctgctcgtggcgctgatctaccatgaggtaagcggctggtatttcctctgggtgatgctgggggcggcggtgctcggcgcgctggccctgcggctgggcggcggcaagcgggccgtcatgtacgcaaaagaagggctgatcgcggtggcgctcagctggatcgtgctttcgctcgtcggcgcgctgccgttcacgctttcggggcagatcccgttttatctcgacgccgtgttcgagatgatctccggctttaccaccaccggctcgagcatcctgcccgcggtggaggagctcgacaagtgcatgctgttctggcgcagcttttcgcactggatcggcggcatgggcattctggtgttcatgctggccatcgtccggatggacggcggccaggccatccacctgctgcgggccgagagccccgggccgacggtctccaagatggtgccgcggatggccgattcgtccaagatcctctacgggatctattttggcctgacggtgctgcagatcctcttttatctggccggcggcgagccgctgcttgactcgctctgcaatgccttcggcacggccggcaccggcggctttgccatccgcaacgattccttcgcctcctacagcgcctacacgcagacggtcacgaccgtcttcatggccctgttcggcgtcaatttttcgatctatttcttcctgctgcgccggaaattcgacctggcgtggaagaatacggagctgcgctggtacgtgtcgatcattctcggctcgacgctgctcatcacctgcaacatcatgaagctctacggcggcgatttcggcttcagcctgcatcacgcggcttttgccgtctcctccgtcatcaccacgacgggctttggcacggagaactttgacctgtggccggagttttcccgcgtgatcctggtgctcctcatgatcgtcggtgcgagcgccgggtcgacgggcggcggactgaaggtctcgcgcgtggtcatcctgatgcgcgcggccaaggcggagctgcgcaagatcctgcacccgcacaccgtgaaggtcatcaccgtcgacggcaagcccgtctccggcgagacggtccgggccgtgagcacctattttatcctgtacgtgctcatcgctgcggcgtcggtgctgctcgtctcgctcgacggctacgacggctcgaccacgctcacggccgtcatggcgacgttcaacaacatcggtcccggcctcggcctctgcggcccggcgggcaacttcgcgttcttttctccgttcgcgaaggtgatcctgtgcctcgatatgctgctcgggcggctggagctgtacccgatgctggtgctgctgatgccgagcacgtggagaaagaaataa

SEQ ID NO: 7 - DNA, 657 bp, Unknown
  Unknown gut bacteria
ttggacgcgaaattactggacctgctggagcagatcgcaaaggcgatcgcagcacaattcggcagcaactgcgaagtggtgatccacgagctttccggcaaaagcgcctattcctcgatcgtcgcgatcgaaaacgggcatgtgaccggccgcaaggtgggcgacgggccctcccatgtggtgctggagcagctggggcacgaggatgacagcgcaaaggatcagcttgcgtatctgacgcgcacaaaggacggaaagatcctgaaatcctcctctgtgtatatccgtgacgagtccggaaaggtctcggggatcctggggatcaactatgacatttccatgatgcagctgtttgaaaactccctgcatgacttcatctcagccgatcagcatgcgagccgcgagcccgagcgcatcaccctcaacgtggccgatctgctcgacgacctcatccggcaggcggacgaactggttggaaaaccggtcgcgctgatgaccaaagacgacaaggtcaaggccatccgctatctcagtaattccggcgctcttctgattaccaaatccggcgataaaatagcgaagcatttcggcatatccaagtacactctctattcatacctagataacagtaaaacaggaggaacaaacgaactatga

SEQ ID NO: 8 - DNA, 1176 bp, Unknown
  Unknown gut bacteria
gaagacgccgtcaacgagatcttccccgagatctacgaagctgccattgtcaagcaggagctcaaggccgtcggccagccctccgttaccgatatgcagacccccgaagacggcagcgtcgtgctgaccgtttccactgagctctaccccgaggtcaccctcggcgagtacaagggcatcgaggtccccaaggagaccgtttccatctccaaggccgaagtcgacgcagagctcggccgcatgcaggaccgcaacgcccgcatcgagaccgttgaccgcgaagccaagaccggcgacaccgtcattctggactttgaaggctttgtcgacggcaagcccttcgacggcggcaaggccgagggctataccctgacgctcggctccggcgcgttcatccccggcttcgaagatcagctcgtcggcctgaaggccggtgaagagaaggccgtcgaggtcaccttccccgagagctacaccaaggagctggccggcaaggccgcgaccttccagtgcaagatccacgaggtcaaggagaccatcaagcccgagctcgacgacgagttcgccaaggacgtctccgaatacgacacgctggccgccctcaagaagagcatcaaggccgacctcgccaagaagcgtcaggaagctgttgaccgtgactttgagaacgaggctgtcgttctggccggcaagaacatgacctgcgacatccccgcctgcatgatcgacgagcaggtcgacaagcacctcgagcagtttgcctatcagctgcagtcccagggcatgaagatggaagactacgtcaagatgatcggcggcgacgtcaagggcatgcgcgattccatgcgcccgatggcggagcagaccgtccgcagcaacatcctgctgagcgagatcgtccatcaggagaacatcgacgtgaccgacgaggaagtcgaagaagagctgaagaagctggccgagcagtacaagatggagctggacaagatcaaggaaatgatcgacgtcgaggccgtcaagtccgatctcaagggccgcaaggctgtgaagctgatcgtcgacaatgccaagcccgtcgagaaggaaaaggaaaagaaggccgccaagaaatctgccaagaaggaagacgaggctgccgaagctcccgcagaagaggctcccaaggctgaggaataa

SEQ ID NO: 9 - DNA, 1653 bp, Unknown
  Unknown gut bacteria
cagcagatgatccaggagaagatccacgaatacgggctgaccggcgtagtcatctgttcgtgctcccccagaatgcacgagcagacgttccgcaagacctgtgaaaaagcaggtctcaacccctatatggtccagatcgccaacatccgcgagcagtgctcctggatccacaagtacaaggaggcgggcacggaaaaggccatcatcctcggccgggccgccatcgccaaggtacatctgaacgcgccgctgaccgcgggcagcagccccgtgaccaagcgggcgctcgtcatcggcggcggcatcgctggcatccagacggcgctcgacatcgccgaggccggatttgaggtcgatatcgtggaaaagcagccgaccatcggcggcaagatgacccagatcgacaagaccttcccgacgctcgactgcgccgcgtgcatcctgaccccgaagatggtcgactgcgcacagaacgagaagatccacatctattcctactccgagatcgaatccgtgggcggcttcgtcggcaacttccacgtgaagatccgccgcaaagcgcgcttcgtcaaggaagacgtctgcaccggctgcggactttgcaccgagaagtgcccgcagaagaaggtcccgaacgaattcaacctcggcatggacaaccgccgcgccatctatatccccttcgcacaggccgtgccgaaggtcgcgaccatcgatcccaactactgcagcatgctcaaaaacggcaagtgcggtgtgtgcgcaaaggtctgttccgccggcgcgatcgactacaagcagaccgacaccttcatcgagcaggaatacggcgccatcgtcgccgcgacgggcttcaaccccatcgacctttccaaattcgatgaattcgcctacagccagagcccggacgtcgtctcgagcctggaatttgagcgcctcatgaacgccgcgggcccgacgagcggcacgctcctgcgcccgtccgacggcacgcacccgaagaccatcgtcttcgtccagtgcgtcggctcccgctgtgacggtgtggagaagggcaagccctactgctccaagatctgctgcatgtacacggcgaagcacgccatgctctgccgcgaaaaatacccggacaccgacgtgtacgtcttctacatcgacgtccggacccccggcaaaaactttgacgagttctaccgcagagccgtcgagcagtacggcgtgcattacatcaagggcatggtcggcaaggtcacgccggagggcggcaagctcaaggtgcaggcgtccgacctgctcgagaaccggcagctgcacatcgacgccgacatggtcgtcctcgcggccgccatcgagcctgacaagtccgcccggccgctcgctacgatgctgacggcctccatggacaccaacgactttttcaccgaggcccatccgaagctccgcccggtcgaaagcccgacggcaggcgtgttcctgtccggcatgtgccaggggccgaaggatatccccgagacggtcgcacaggcgtccgccgcggcggcgaaggtcatcggccttctgtgcaaggacagcctgacctgcaacccgtgcgtggcgcagccggatgagatgatgtgcaacggctgctccaactgtgaaaaggtctgcccctac

SEQ ID NO: 10 - DNA, 843 bp, Unknown
  Unknown gut bacteria
atggaaaagaaaaaaggcctctccctgcagacgatcctgaccatcgcgggcatcgccctcatctacgtgctcgccttcctgctcgaccgcatcccgggcgtgcccatcatgctcacgacggttttgcgcaagggcgcgatctattccctcgtcgccgtctccatgaacctgctcaacggctttacgggcctgttctccctcggacaggcgggcttcatgctggtcggcgcctatgccttcgccgccatcaacatctcgagcggcatccgctcgacggtgtatcagtactatgatccgctgctcaaattctccctgaccgagacgctgcagaacgccctcggcaatacggcgggcaccgtcctcggcgtgttcgtttcgctgctgctggcgggcctgctcgccgcggggctggcgtacctcatcggcctgcccgtcctgaagctcaagagcgactatctggccatcgccacgctcggcttcgccgagatcatccgcgcgctggtccagctcgaggcgttcgcgcccgtcgccaacggctcgcagctgctgcgcggcttcccgtatttctccgataccttcatgccgttcgtgatcgtcggcatctgcatcgccatcgtcgtgctgctgatcaactcgacctacggccgcgccttcaaggccatccgcgatgatgagatcgccgccgaggccatgggcatcaaccttgcccaccacaagcgcatggcattcatcatctcctcgttctttgccggcatctccggcgcgctgctggccatgtaccagaccacggtccaggccaacacgttcaaatcggccatgacgtatgagatcctgctcatcgtc

SEQ ID NO: 11 - DNA, 978 bp, Unknown
  Unknown gut bacteria
atgatcgtggatattacctaccccattgagacctggccgaagcagaatgagctgacgcacatcaccgagggcatcaagcagtccaccggcggctcggtctgcaacaccatttcggacctcgcaagactcgatccccagcttccgctcgtggcctccggctttgccgggcatgacgccgagggcgatttcgtcctgcaggagatgggaaaatacaagaatatcgacctttccatggtcaagcgcaacggccgcacgtcctttaccgcggtcatgtccaacaaccagacgaaggagcgcaccttcttccagcacgcgggcgcgaacgcctactacggcgaggacgacatcgactgggataagctcgacgtcgatatcttccacattggctatatcctgctgctgccgcatctggacgagccggacgcggaatacggcacgaagatggcgcggcttctgcaccgggcgcagaaggccgggatgaagacgtccatcgacgtcgtctccgaggcgggcgagcgctttgcgcggctcgtgaccccggcgctcaaatacaccgactactgcatcatcaacgagcttgagacccagcagaccacgggcgtgctgctccgcggagaagacggcgtgctgcatgtggaaaacatgaaggccgcgctgcagaagctccacgagctgggcgttgcgaagtgggccgtcatccactgcccggagatcggctgcggcatggacgagaacggcaattactatgagtttgagagcctgaagctcccgaagggctatatcaagggcaccgtcggcgcgggcgacgcgttctgcgcgggcgttctgtacgcggcggagacggatatgccgctgccggaggcgctgaagctcggcgcttgcagcgcggcggcctccctcagcgaggtcagcgcgtccgacggcgtgaagacgaaggatgaagtcctgaagctgtacgagctgtacggcaagaaataa

SEQ ID NO: 12 - DNA, 567 bp, Unknown
  Unknown gut bacteria
atgacaaccttctccgagcagttccctatcgtatttcaggccctgaatgtgggctttttgcagacgctcaagctgttttttgtgacgctcatcggcgcgatcccgctgggtctgatcatctccttcggctccatgagccgctggtcgccgctgggctttctgcgcccgtatctgaaaaatctccccaaggacggcaagctcacctggtggcagaagacgcagctatggttcgcggtcgacttccggcccatccgcctgattgtgcgtttcgtcatctgggtcgtgcgcggcacgccgctgatgctgcagctgctggtgttctactacttccccggccttgtgctgcacaagaatatctggggcagcggcgaggcagggcgcttcctcgcatcgtcgatcgcgttcatcttcaactacgcgtgctatttctccgagatgttccgcggcggcatccagggcgtcccgaaggggcagcaggaggctgggcaggtgctcggcatgacgagcacgcagatcttcttcaaggtgacgctgctgcagatggtcaagcgcatcgtgccgcccatg

SEQ ID NO: 13 - DNA, 1449 bp, Unknown
  Unknown gut bacteria
atgcctgaaatcaaactcgaacacgtcaccaagcgctgggccaagttctacgctgtggaagacctgaatcttaccattgagaataacgcgttcgtcacgctgctcggtccctccggctgcggcaagaccacgacgctccgcatgatcgcgggtctggagaccccgacgtcgggccgcatcacgatcggcgacaaggtcgtcttcgacagcgacctcggtatcaacgtcccggccaacaagcgcaaggtcggcttcctgttccagaactatgcgctctggcccaacatgacggtctaccagaacatctccttcggcctctccaacatcaaagaggagctcccgaagatcgacttcgaggccaaaaatgctgcgcgtctggctcagatcctccagactccgtccgatgtgaccgcggttctggacgagtgccgcgacaaggacggcaagctggaagaaaagaaggccgtcctcaagctcatcgacgcctttacgctctcgcagtacacggcgaagaagctcttcggctatcatctggagaacggggccgatcgcgccgccgcgatcgccgcactgcaggcaaaggtcgacgcagcccataaggccgcgaaggacgccggctgcacgctggacgaggagttccgcttctgcagggacggcagcgtcgtcaagcagacgagaaagctcacgaaggaggagatcgacctctccgtccgccgcgtcagccgcatcgtcaagattggcatgttcatggaccggtatgcggccgagctctccggcggccagcagcagcgtgtcgccatcgcaagaacgctcgcgccggagcccacggttttgttcatggacgaaccgctgtcgaacctcgacgcgaagctgcggctcgagatgcgctatgagctgcagcgcctgcacgtggagaccggctcgaccttcgtctacgtcacgcacgaccagatggaggccatgacgctcgccacgcagatctgcctcatcaataacggcgttctgcagcagtatgaagcgccgctggaggtctatcatcacccggcgaacctctttgtcgccgacttcgtcggcaacccgtccatcaactttgtcgaagccaagggcaagcaggcggccgacggctcgctgaccctcacggtcctcggtgggctgacagccagattccgcccggcaaaggcgctcgagctttccaagtggttcgcagaccgcgacgcagctgccgccaagaaagccgccgacctcaaggagaaggccgcgcagaagggctacgtcgaaaagggcaacaaggatgaggtcttccgctatcatatcgcaaaggtcgacgaggaagacgactcccttgcggagcttcccgagatcacgaacgaagattttgtcctcggcatccgcccggagttcctcgacatcgcggacgaagggaacctccgcggcgagatctacggcgcc

SEQ ID NO: 14 - DNA, 1020 bp, Unknown
  Unknown gut bacteria
atgggcggcgacaacgccccggatcagatcgcgctcggtgcgatccaggccgcgaaggactttggctgcgaggccgtactggtcggccgcggcgaggccattttgcaggcgctcaaggaccaagggatcgagacgcttcccaagggcgtggagatcgccaacgccgacgacgtcgtcgatatgcacgacgacccggcgacggtcgtgaaaaagaaaaaggattcctccatggtcgtcggactgaccatgctcaaagagggcggcggcgacgcgttcgtctccgccggctcgacgggcgcactgctctctgcggcgacgctgatcgtccggcgcgtcaagggcatccgccgcgcggccatgggcccgcagatcccgacgaagaccggccgggagtgcgtcctcatcgactgcggtgcaacggcggactgcacgccggagtttctgctgcagtttgccttcatgggctcgtattacgcggaaaaggtcctcgggatcgaaaacccgcgcgtggcgcttctcaacatcggcgcagaggactccaagggcggcgagctgcagaaggccgtttacccgctgctgaagcaggcgggcgaggccgggaagatcaacttcaccggcaacatcgaagcgcgtgacgtgccgctgggcggcgcggacgtggtcgtttccgacggcttctccggcaatatcctgctcaaggggatcgagggcatggcgcttttcatggcctccatgatgaaggacatgttcaagaaaaatctgctgaccaagctggccgcgcttttgtgcatggacggcgtcaaggcgttcaagaagaaaatggactaccgcgagaccggcggcaccgcgctgatcggcctcaacaagcctgtcatcaaggcgcacggctcgtccgacgcgctggccatccgcaacgccatccggcaggccatcggcgccgtcgaggcggatgtcgccgggacactggcagcaaatatcgaccatatggtcgttccaaaggagtatcaacatgctgagtga

SEQ ID NO: 15 - DNA, 1347 bp, Unknown
  Unknown gut bacteria
atggcgacccgtcttccgtattccgattttgccgatatcctgccggaaatgaacaaggccggctactattcggtggaatgctggggcggcgctacgttcgactcctgcctgcgttacctgggcgaggatccctggcagagactgcgcgacatccgcaaggccatgcccgacaccaagctgcagatgctgcttcgcggccagaacctgctcggctacaagcactatcatgacgacgtcgtcgagaagttcgtcgagctgtccatcaagaacggcatcgacatcctgcgtatctttgacgcactgaacgacttccgcaacatcgccaccgcgctggaagctaccaagaaatacgcgaccaagaacaccgtcgcctccggctgtatctcctacacccagagcccggtccacacggtcgaaatatatgtcgagatgtgcaaggagctcaagaacatgggcttcgacaccatctgcctgaaggatatggccggcaccatgagcccgtacgaggccgagcacctcatcaagggcatcaaggacgccgtcggcgatgttcccctcatcctgcacacccactgcaccaccggcatggcttacatgaccgtgacgaaggccatcgagtccggcatcgacgtgatcgactgcgcgacctcctgcttctccaacggcaccagccagccctccaccgagaccatgttctacgccctcggccagtacggcatcgagactggcctcaatgaggacgtcatcaacaaggtcaacgactacttcaagcccatcaagcagaagtacgtcgattccggccgcatcagcgccaagtccatggcgaccgacgcgcaggcgctggtctacaaggtcccgggcggcatgctctccaacatgatcgccaacctgaccgacatgaaggccatggataagttcgacgccgcgctcaaggagatccccgaagtccgcaaggatctgggctatcccccgctggtcaccccgctgagccagatggtcggcaaccaggccgttaccaacgtcctgatgggcgagcgctacaagatcgtctccaaggaagtgcagaactatttcaagggccagtacggcatcgcgcccgcgcctgtctctgaagagctgcaggccaagatcctcggcgagggcggcaagcccgtcgactgccgcatcgaagacgccaagcgcaccggcgaagacttcaagaaagccaaggaagccctcggcgatctggcgaagagcgaagaggatgtcatgagctacatctgctatccggatcaggccatgaagttcttcgaagaccgcaaggccaaggaagaaaacgtctgcacctacgtcatcgaagaagcataa

SEQ ID NO: 16 - DNA, 1329 bp, Unknown
  Unknown gut bacteria
ctgcgtctgcgcggcacgcgcggaaaagcgctgaaaacaaaggagcacggaacagtgaacacttatatagtaaagggagatatctgcttcagccggagcatggatgagatcgtctgtctggagcagggcagcatcgttgtggaaaacggccgcatcaccggcgtctttcagacgctgccggcgcgctatgccgcgctgccggtgctcgattacggccatcggctgatcctgcccggtatgtccgacctgcatgtccacgcgccgcagttcgccttccgcgggctcggcatggatatggagctgctggagtggctcaacacctataccttcccggaggaatccaaatacaaggacctggactacgccgaaagggcgtatggcagcttcgcctcgcatctgctgcgcagcacgaccacgcgcgcggccatcttcgccaccatccatgtgcccgcgacggagcttctcatgcagaagctggacgcgatggggctggaatgcttcgtgggcaaggtcaatatgaaccgcaactcgccggtctacctgcgcgagatctccaccaaccaggccctgcgcgccaccgagcgctgcatctgcgagacgaaggcgcgctatgcccatgtcaggcccatcctgaccccgcgcttcatcccgtcgtgcacggacgatctgatgttcgggctggcgcggctgcgggtgaaatacgacctgccggtgcagagccatctgtcggaaaactattcggagatcgcctggatccgcgagctgtgcccgcgctcgaagaactacggcgacgcgtatgagcagttcggcatgttcggcggcggatatccgtgcatcatggcacactgcgtccactcgaacgaggacgagcaggcgctgatgcagaaaaacggcgtgttcatcgcccattcgccggaatcgaacatgaacctcgcctccggcgtcgcgccgatcaataaattcctcgataacggtctgcaggtcggccttgcgacggatatcgccggcggcagccacgagagcatgctccgcgccatgacccacgccatccaggcctcgaagctccgctggcggctgtatgaccaggacgtgaagcccctgtcgtttgaccgcgcgttctatcttgccaccatgggcggcggcgcgttcttcggcaaggtcggctcgttcctggacggctacgaatttgacgccgtcgtgctggacgacgcggcgctggaccatccgcaggagctttcggtccgcgcccggctcgagcgcgcggcctatctggccgacgaccggaacctcacggccaaatttgtcgcggggcagaaaattctcggttga

SEQ ID NO: 17 - DNA, 882 bp, Unknown
  Unknown gut bacteria
atgaagaaaaaacgctatttttcccgcacggtctgctttctgctctgcgcggtgttcgcgctgttgtttttgctgccgacggttctgaccatcacgaactccttcatgacgcagagcgagatcacggccagctacggccaggtctttgaaaacgccaacgacggcaagagctacatctccaagaccattgaactcaaattcatccccgacaaggtcagcttcacccagtatttcaccgtcctgctcaaaagcccggactatctgctgaaattctggaactccgtcatcctgaccgcgccgatcgtcttcgcgcagctcatggtcgcgtccatcgcggcctatggctttacccgctggcgcgggaaggtgcgcgacagtctgttcttcttctatgtgatcctgatgctcatgccgtatcaggtcacgctggtccccaactatctggtgagcgactggctgaagatcctcaatacccggtgggcgatcttcctgcccggcgcgtttgcgccgttctcggtctttctgctcaccaaattcatgcgccgcatccccatggctgtcatcgaatcggccaagatcgacggcgcgaacgagtggcatatcttctggaacatctgcctgccgcagtgccggagcgccctctattccattgcgatcctggtgttcatcgacaactggaacatggtcgaacagccgctgatcctgctcaacgacgtggagaagcagccgctttcgatgttcctgtccagcatcaacgccggcgagatcggcatcgcctttgccgccgccgtcatctatatgatccccggtctgctgctgtttctgcacggcgaggcgtatctggtggaaggcatcgcacattctggctctgtgaaaggataa

SEQ ID NO: 18 - DNA, 1347 bp, Unknown
  Unknown gut bacteria
atgacccacacgataggcatgatctcgcttggctgcgccaaaaatcaggtcaatgccgagcatatgctctggctgctgcggcaggcagggtatgagatcagccccgaccccgacggtgcggagctcgtcatcgtcaacacctgcggctttatcgagtccgcaaagaccgaggccatcgacaacattctcgccatggcgcagctcaaggcggagggccggatccagaagatcctggtcaccggctgtcttgcgcagcgctatcaggaggagattctgcaggaaatgccggaggtcgacggcgtgcttggcaccggctcctactttgacgttgccaacgcggtcgggcaggtgctgagcggcaaacgctacaagcgcttcgacgatatcaatgcagaccagtcggaggatggccgtatcctgaccacgccggagtattatgcctatctgaagatcgccgagggctgcgacaaccactgtgcctactgcatcatcccgaagctgcgcggcaagctgcgcagccgcccgatcgaggagctcgtcaaggaggcggagcagcttgcggccgacggcgtcaaggagctgatcgtcgtcgcgcaggataccagccgctacggtctcgatctctacggcgagcggaagctcgcggagctgctgcggcagctgtgccggatcgacgggcttgtctggatccgcgtgcactatctctatccggatgagatgtcacaggagctgattgacgtgctggcgaacgagccgaagatcgtcaagtatctggatatcccgatccagcacatcaacgacgatatcctccgccgcatgaaccgccgcggcaacggcgaatacgtcaaggagctgttcgccaagctccgccgcgagatcccaggccttgtgctccgcacgagccttatcaccggccttcccggcgagggcgaggcggaatttgcccagctctgtgactttttgaaggaatacaagctcgagcgcgtcggtgcgtttgcgttctccccggaggagggcacgcgcgcggcagagatggaatatcctgataccgagatcgcccggcagcgcgcggacatggtcgccgagatccagtcccgcatcatggacgattacaacgaatcgtgcatcggcaagaccatgcaggtcctgtgcgagggctacgatcccgatgaagagagctattacggccggacctttgccgactcgccggatattgacgggaagatctggttcacggcggaaaaacatatcaagaccggtgactttgccgacgtccgtgtggtggacgcctatgacggtgagcttgtcggtgtgctggaggaagaatacaatgacgactgcgagtaa

SEQ ID NO: 19 - DNA, 1383 bp, Unknown
  Unknown gut bacteria
ggcaagtcgaccctcggccgcaccatcctccagctctaccatcagacctacggccgcacgatgtactatggaagatcgctggacgatctggcgccgaagtacgtcatcgacaccgtcaaaaacctcaaatcacgccgggccaagctccacgagctggagcagaagcgcgataagctcgaggccgagtacgccaagctctccgaaacggagcagtatgccaagcacaccgagctcgacaccgcgcgcaagctggccgaggacgcgctgctcgacatcacaaagatcgtcggcggcttcctcgtggtcgatgatctcgatcccgtgatcgcggcctattccaaggactacggcatcgcgcgcaagatctccgcgctcgaggaaaggcggcaggcgctgcaggtcgacgtcgacgacgcgcagtacgcgaagaagaccgccgaagaggcgggcaagtccgaaaagtccggccagctcgaaaaggcacaggaaaagctcaagcagtgtgacgatcagatcgccgcgctgcggcagcagctggacgctggccgccaggagatcgaggcgctgcgccagccgtatgccagcgatcccgaattccagaagtatgaggcctaccgcgacgacggtatcgaccttgcccgactggagtacaacgagatgcgccgcctgcgcagcgatatgcagctcattttccaggatccgtattcctcgctgaacccgcgcatgagcgtcggccagatcatcagcgagggcatgcaggcgcacaacatgatcaagaaaaaggacgcccgtatgcagcagctcgtcctgaacatcatggacgaatgcggcctcgcaccgtacttcctgcaccgcttcccgcaccagttctccggcggccagcggcagcgcatcggcatcgcccgcgcgctcgccacgaacccgaagttcgtcgtctgcgacgaggctgtttccgcgctggacgtgtctattcaggcccagatcatcaacctgctgctcgacctcaaggagcaccagaacctgacctacatgttcatcacgcacgacctgtccgtcgtcaagtacatctccgaccgcgtcggcgtcatgtacctcggcaacatggtcgagctggcggaggccgacgagatcttccaccacccgatccatccgtacaccgaggccctgctcaacgccatcccgacgacggataccgtcggcgcgaaggagctctccatcctcgaaggcgatatccccagcccggtcaacccgccgaagggctgcaaattccacacgcgctgcaagtactgcacagagatctgcacgcaggtcgtcccggcgtgggaagaggtccggccgaaccatttcgtcgcctgccatcataagctcgaagtcaaggagtaa

SEQ ID NO: 20 - DNA, 1194 bp, Unknown
  Unknown gut bacteria
atggtcagtgaaaaaatggtcgcctggggcagccagggctgcgtcatccgggatctcgccgcctacggcgagcagcgcgccgccgtcgtcggcgcggaaaacgtgttcaactttaccatcggcaatccttccgtcccggcgccgtcctgcgtccggcagacgatcgagcacctgctgcagaccgtcccggccgagcagctgcacgcctatacggccgcgccgggccttgcgtccgtccgcgcgaagatggcggcgtatctcgagaagacgttcggcgtcggctaccgcgcggaggacgtgtatatgacctccggcgcatcctcggcgctggcgatgctggcctatgcgctgctctcgccgggcgacgaggtgctgacgctcagcccgtatttctcggagtacaagctctacgccgaggccgcgggcggcacgctcacggccgtgccctcgaacccggaggatttccagatcgatctggacgccttctccgctgccatcagcgagaagaccgccgtcgtcctcctgaactccccgaacaacccttccggtgtcatcctctcccgccggagcatcacaaagctggcggagctgctggagaaaaaatcagccgaatacggccaccgcatctacatcgtcgccgacgagccctaccgcgagctggcctatgacggcgaggaggtgccgttcatccccgccatctacaaggacaccatctactgctattccttcagcaagaccctctcgctgcccggtgagcgcatcggcttcctggccatccatccggagctgaccgactacgcgcgcgtccgcgcggccatctacggcgcgggccgggcgctcggctatatcaacgccagcacgatgttccagctcgtagcggcggaatgcgtcgggcagacggcggatatctccgtctacaagcagaaccgggatctgatccatacggcgcttctggatatgggctatacctgcgtgaagccttcgggcgcgttctatcttttcctcaaaacgccggagccggacgcgaccgcgttctgcaaaaaggcgatggcgctcgacctgctggtcgtgccgggcgacgaattcggctgcccgggctacgtccgcctggcctactgcgtccccaaaaccatgctcgagcgcagcctcccccgcttccgccagctcgccgaccaatacggcctcaaaaaataa

SEQ ID NO: 21 - DNA, 498 bp, Unknown
  Unknown gut bacteria
gcctatgacaaccggccgctcaccttcgacgaatttacagaccgcatccatcaggccatctacgtctccgccacgcccgcggactatgagcgcagccgcgccgggcagatcgccgagcaggtgatccggcccacgggccttctcgaccccgaggtcttcgtgcgccccattgaggggcagatcgacgatctcatcggcgagatcaacgccacgaccgacaagggcgagcgcacgctcgtcacgacgctgacgaagaagatggccgaggatctgaccaaatatctgaccgaaaacggcatccgcgtgcgctacatgcactcggacatcggcgcgatggaacgcatggagatcatccgcgatctgcgcatggcgaagttcgatgtactggtcggcatcaacctgctgcgcgaggggctcgacctgcccgaggtctcgctcatcgccattcttgacgcagacaaggaggggttcctgcgctccgagacgagcctcatccag

SEQ ID NO: 22 - DNA, 1932 bp, Unknown
  Unknown gut bacteria
gaccacggcgtcatgtacggcacgatcgacttttaccgcgcagcaaagaaggccgggatcaagcccatcgtcggctgcgaggtctatgtcgcccgccgcacgcgcttcgacaaggtccacggcgtcgacaaagaaccctaccatctcgtcctcctgtgtgaaaacgagaccggctaccgcaatctcagctatatggtctcgctcggcttcacggagggcttttataaccgcccgcgcgtggatatggagctgctgcgcgagcatcacgagggcctgatcgccctgtccgcctgtctggctgggcgcatcccgcagtcgatcatgcaggacgacctgcaggccgccgagcaggcggcgcgcgagtatgccgaagttttcgggccggaccatttttatctggagctgcaggatcacggcatcccggagcagcggaccgtcaacgcacagatccgcaagctcgccgaaaaactgtctctgccgctcgtcgtgacgaacgacgcacactatctgcgcaagtcggacgcgaaaatgcaggacgtgctgctctgcatccagaccggcaagaccgccgacgacccgaaccgcatgaaatttgagacggaggaattctatctcaagagcgaagaggagctgcgcgagctgttcccggatgtgccggaggcgtttgacaatacagtaaaaattgcggagcgctgcaatgtggagtttacgttcggcaagtatttcctgccggaattcaagctcccggagggcgtgacgagcctttcgtatcttaagcagctctgccgcgagggctttgacgagctctacgggacagagcacccggaatatatgcagcagctcgactacgagatcgacatgatcgagaagatgggctttaccgattacttcctcatcgtgtgggatttcgtgcgctttgccaaatcggccgggatcccggtcggccccgggcgcggcagcgccgcgggctcgatggtcacctactgcctgcatatcaccgagatcgaccccatgaaatacgggctttatttcgagcgtttcctcaacccggcgcgcgtgacgatgcccgatatcgatatggacttcggtgacacccggcgcgccgaggtcgtcgactacgtccggcgcaaatacggcgaggaccatgtcgcacagatcgtcaccttcggtaccatggctgcgcgcggctccatccgcgacgtcggccgcgtgatgaacttcacctacgccgagacggacgcggtggccaagctcgtgccgccgacgccgcacatgacgctggcggacgcgctgaagcagtcgccgcagctgcggcagatgtacgactctgacgaacgggtcagggaactggtcgacacggcaaaggccatcgagggcatgccgcgcaacacctcgacgcacgccgcgggcgtggtcatcaccaagctcccggtctatgactatgtgccgctggcgacgaacgacggcacgatcgttaccgaatacaccatgacgacgctggaggagctcgggctcctcaaaatggacttcctcggcctgcgcaacatcaccgtcatcgacgatgccatccgcgatatccgtaagaccgagccggacttctccatggcccgcgtcaccgacaacgaccccaaggtcatggacatgctcacgcagggccggaccgccggtgtgttccagatggaatcgaccggcatgacgggcgtgtgcatgggcctgaagccgcagtcgatcgaagatctgtccatcatcgtcgccgcctaccggccgggcccgatggaatcgatcccgcgcctgatcgcctgcaagcaggatccgtcgctcgtcaaatacaagcacccgatgctgcagcccatcctctccgtcacctacggctgcatcctctatcaggagcaggtcatcgagatcttccgcaagcttgccgggtattcgctc

SEQ ID NO: 23 - DNA, 1323 bp, Unknown
  Unknown gut bacteria
atgcaggcgcagcggatgacggagcccggcgatacggtcgtatgcgcagtgtcgggcggcgcggattctgtgagcatgctgcacgtgctgctgtcactgcaggacacgctcgacatccgggtagaagccgcgcacttcaaccatcacctgcgcggcgcggaatccgaccgcgacgaggcctttgtccggcagctgtgcgcctcgctcggcgtgccgctgcacacgggcggcggcgacgtgcaggcgcgggcggcgcagacgcatgaatctctggaagaggctgcgcgcaagctccgctacgcgttctttgacacactccccggccttgtcgccacggcgcacacgcaggacgacaatctcgagactgtgctcctgaacctcacgcgcgggaccggccttgccgggctgaccggcatcccgccgaagcgcggacggctcatccggccgatgctggtctgcacgcgggcgcagatcgaggcgtgtcttgctgagcacggattttcttatgtgaccgacagcaccaatctcctgccggacgcccggcgcaaccggctgcgccagcgcgtgatcccgcttctgcgggaggaaaaccccgccgtcgcacagaccgtcttccggacctgcgcgctgctccgtaaggatgacgcatatcttgatacgcgggcgcgcgaggcgctgcaggctgctcaattgccggacggtgtcagccgcagtgcactttccgcttggccggaggctgtgcgcacccgcgcagtccggctgctgctcgagtcgatccatgcgcccaatctgacgcagcggcatatcgatgcggtcgaccggctgctgttcgcttcgtgcccctccgcttctgtctcgctgccgggcggctttgccgcgcggctggaatatgacaggctgtacctgacggaccgctcccctgccgcttccttttcacccgtgacactttcgccgggcgagacagtgctgatcccggcgctcgggctgcgcgtcgaatgccggatcgaagaaaattttcaggaaaaagcaaaaaccctctccacttttgcagtcaaatatgataccatagagcaaactccccggatcacgatccgtccgcgtcaggcgcatgacgtcatgcgcacggcaggcggcacgaaatcgctcaaaaagctgctgatcgaccgcaaggtccccgcagcacgacgtgcgctcatgccggtggccgctgacgcatccggtgttctgggcgtttatgggatcggcgtcgatctgggccgcgccgcggctccgggcgaacgcgcggtcatcatcacaatcgaagaaacagagaaagaggattag

SEQ ID NO: 24 - DNA, 1836 bp, Unknown
  Unknown gut bacteria
gcgccggaggaccgcttcccggccgcgctggatgatgcgctcgtcagctatcagtatctgctctcgaaggggtatccggccaaccagatcctgctgtgcggcgagtctgcgggcggcggactgatctactgcctgtgcctgcggctcaagcagcggaagctgccgctgccatgcgggctgatcggcatctcgccgtggaccgatctgaccggctccggccagtcctatatcgacacccgcgacatcgacccctccatgacgccggagctgctgcagttttacgcggcgtgctataccgaccatccggaggacccgctgtgttcgccgctgttcggcgatctgacgggctttccgccgtcgctgctgttcgtgggcggggacgaggtcatgctcgacgacacgcgggtgctgcacgaaaagctgctggccgcgggctgccggagcaggctcatcgtcgcgccggagcgctggcacgcgtatgtgctgtattatctcaatgagaatatgtcggatttcgacacgatcaaccagtttatgacgcgtgtgctctccccggcccggaagctgcggtggatgcggctggacaacgccgcgaagatctaccccgcggccaagcggcgcaactggacgaactacttccgcctctccgccacgctgacagagccggtcgacgtgcaggtgctgcgcgcggcgctggacgttacggtgcggcgcttcccgtcgatcgcggtgcggctgcgccggggcgtgttctggtattatctcgaggagatcagcaaggcgcccgccatcgaggaggacaagagctacccgctcgtccacgtgccgttcgacgacgtgcgcaggtgcgcgttccgcgtgctggtgtataagaaccggctggccgtggagtttttccacgccgtgaccgacggcacgggcggcctcatcttcctcaagacgctgacggcggaatatctgagccagaaatacggcatccagatcccggcggagcgcggcgtgctcggccggctggaggatccgggtcccgaggagctggaggacagcttcctgcactatgccggtaacgtcaccgccagccgcaaggaggccaccgcctatcagctctccggcacgccggagccggacggctttctggatctcacgacgctgatgctgccggtggacgccgtaaaggccaaggcgaaagagtttggcgtcagcgtgacggagttcatcgcggccgtcatgatgaaggccatcagcgacctgcagaccgagaaggtgccgcggcggatgcgccgccggcccgtcaaggtcctgctgccggtcaacctgcgcgggctgttcccgagcaggacgcttcggaacttcgcgtcctacgtgacgccggagatcgacccgcggctgggcgactattcgctcgcggagatctgcaagatcgtgcgctaccgcatgggtctggagaacgacgcgcggatgatggccgccaagatcgccacgaacgtcgcgagcgaacgctcggccgtgctgcgggcgatgccgctgtttatcaaaaatatcgccatgaaggccgttttcgacctggtgggcgaatgcaaatcgtgcctgtgcctgtccaatctcgggctggtacagctgccggacgcgatggcgccgtatgtcgcgcggatggatttcatcatcggcgtacaggcaaaggcgccgcacaactgcggcgtcgtcagctgggacggcacgatgtatatcaacatgatccgcaacatccgcgagccggagctggaatcccatttttaccgtgtcctgcacacgctggggctgcccgtcaaggtcgagagcaaccagcgctggacgtga

SEQ ID NO: 25 - DNA, 1359 bp, Unknown
  Unknown gut bacteria
atgggaaaagggggatttgcgttgcggttgcggatgaaacggatgctgctggccgtgctggccgcggcaatgtcgctggtcctgtccggctgctttgtcaagaccgtcgacgagctgtacacgctccctaagcactctgatgaatataaccggctggaacaggccatcgatcaggtcatgtccagccagaacgcgtcctacgccgcgccggtctccggcatgaaccagcagtcggtccagctggccgatctggacggcgacgggacggaagaggcggtcgctttcctgaaaacgacgggcgacaagccgctcaaggcctgcatcttttcccgcgtcgatgaggattatcagctcatggacgtgatcgagggcgacggtaccagctttgcgagcgtggaatacgtgccgctgaccggcggccccggtgttgagctggtcatcgggcggcagctttccacggacgtgctgcagtcgctgtgcgcgtattcgtacaccggcgggcacgtggtcgagctgctgagcacgaattactcggaataccgctgcgtcgatctcgacgaagacgggcggacggatctgttcgtcctccgctttgacgcggagcagccgcagggcgtggccgagctctaccgctggcagggcgaccagatggagcgcgagccggaggcgtatctgacggccggcgcgtcgccggtcaagcgcattgtgtccggtgatctgatggaagatgtcccggctgtctttgtggcgagcgcctatgaagagaacgggcttgcgaccgacgtgtttgccttccgggacggcgtgttccgcaacattaccgctgccgacccgggcagcgcgctttccaccgtgcgcagctattacgtctacgccaccgatgtggacagcgacggactcatcgagctgccgcagatccttccgctgccgtcggctgcgggctcggaggagaactacagcgtcatcagatggtataatttagacctgcagggccgcagcacaccgaagatgacgacctatcacagcttttccggcggctggttcttatccctgccggaccggtggcagaaccggctctgcatcacccgcagcgaagaggtcggcggtgtccgcggctacgtcttctccgagtggaaggatgagacgcacacggagctgatcttcaccatctatgccttctccggcgacgaccgggcgcagctcgcttcgtctgacggccggttcctccttgccgagaagggcgatatcacatacgcagcgcagcttgcagcagggaagtgggcaggcgagctttccgagcagacgctcagaggcatgttccactttattcatattgactggaattcgggagagacgtga

SEQ ID NO: 26 - DNA, 1101 bp, Unknown
  Unknown gut bacteria
atggactttttaggaattctcagcgagacctttgctcgctccggctttgctaatctcagctggcagcagggcgtcatgctgctcatttcctttgtgctgctgtactgcgccattgtaaagggttttgagccgctgctgctgctgcccatcgcttttggtatgatgctggccaacctgcctgataccggtattatgaccgatgccaccgaagccgccacccttgcggtaaagaatgcttcggccgcactggccgccgatcctaccaacccaacgcttgtctcggaactggctgctgcccagtcccagctggccaatgttcactggtatgattccggcgttctgcgtatcatccaccgcggcgttaagtcttccatcttcccctgcctcatcttcatgggcgtaggcgcgatgaccgactttggcccgctgctggccaaccccatctccctgctgctcggcgctgccgctcagctgggtatctacattgccttcatcttcgccaatgccatcaccgtcggcggcgagcacctgttcacggctgctcaggctgcttccatcggtatcatcggcggcgcggatggtcctaccgctatctttgttaccaataagctggctcccgagctgctctctgccatcgcagtagctgcctactcctacatggctctgatcccgctcatccagccccccatcatgaaggctcttaccaccaagaaagagcgcgtcatcaagatgggccagctgcgcaaggtttccaaggcggagaaggtcatcttccccattgttgtttcctgcgttgttatcatgctcatccccgataccgcttctctgatcggctgcctgatgctgggtaacctgttccgtgaggccggctgcgttgagcgtctttccgacaccgcgcagaacgctctctgcaacatcgttaccatcatgctgggtaccaccgttggcgctaccgccgatggtcagaccttcctttccctgcagaccattggtatcgtcgtaatgggtctggctgccttctgcttctccaccgctggtggtgtactgctgggcaagctgctgtgcctgctcaccggcggcaagatcaatcctctgatcggt

SEQ ID NO: 27 - DNA, 1281 bp, Unknown
  Unknown gut bacteria
atggccataaataccgacaatgcgctgcggcgcagcgtgatctatgaagtatatgtacgcagccacacaccggaggggacctttaaggcgatagagcctgacctggaccggatagcggcactgggggtggatattgtatggttcatgcccattcaccctattggggggctgaacaaaaaaggaagcctgggctgcccctatgccaaccgggactatcgcaccgtgaacccggaatacggcacactggaggattttctgcacctggtggaggagatccataagcggggtatgaagtgcatcattgatgtggtgtataaccacacctcgcccgattccacactggtggcggagcatccggactacttctactataagccggatggctgccgcggcaacaaggtgggcgactggaccgatgtggtggacctgaactatgaaaaccgcgcgctgtggcagtatcagattgattcgctgtgctactgggcacaatatgtggatggcttccgttgcgatgtagccagcaccgtgccggtggccttttggcaggaagcccgccgggctgtggagcagatccggccgggggccatctggctgggagaaagcgtacacctggcgcacattcaggccttccgggagatgggcttctatgccgcgaccgatacggaattgttcacggctttcgatatcctatacccctacgacctgtggccgctgtatgaggatgtaactgagggacggctgccgctttcccggtggtttgatgccgtggattaccaggaggtgagctttgagagcggatacaataagctgcgctgcctggaaaaccatgataccagccgcgcagcggatcgcttcccggagcggaagaagctgctggcctggacagcgctgaattactttatgaagggtaccatactactgtacgctgggcaggaggtatgtgaaaagcacacgccctccctctttgagaaggagccggtggactggaacagcggagaggatatcagcggttatctggccaagctcgcggccatcaagaagaagctgcccaccgatgagctgttccgcattggggcggatgacacacagggcatagtgaccgccagctatatcgggccagccacacgggctgtgggcggcttcccgctggagggcaacggcggcaccgtggccgtacccctgccggatggcgcctacaccgatgccctaagtggcaaagcagtaacagtagccgatggcatgctgaccatcggggaagaagcggtcattctattgggataa

SEQ ID NO: 28 - DNA, 1131 bp, Unknown
  Unknown gut bacteria
atgtatcaactgaaactgacagaaggagcagcccggcggggagcgcttaccaccgtacatggtacggtgcagacgccggcctttatgaatgtggcgacggcggctgccatcaagggcggtatttccgcttatgacctgaaggagctgaagtgccaggtggtgctgtgcaatacctatcacctgcatctgcgacctggtgataatgtggtgcgtcagctgggagggctgcacaggtttaccggttggcagggacccatcctgaccgacagcggcgggttccaggtgttttcgcttgcatcgctacggcatatcgaggaaaagggagtgacctttgcctcccatatcgatggacatcgtatttttatgggaccagaggagagcatgcagatccagtcgcatttgggttctaccattgcaatggcatttgatgaatgtatcgaaaacccatcgccccgggattatgtgcagaaatcggtagcacggacgacccgatggttggagcgctgccaaaaggaaatggcccggctgaacagcctggaggatactgtgaatccacaccagctactgtttggcatcaaccagggcagcacctatgaggatattcgggtgcagcacatgaaggatattgctgcgatgggactggacggctatgccatcggtggcctggcagtgggcgagagcgccgaagagatgtatcatatcattgaggctgtggagccctttgccccgaaggataagatccgttacctaatgggtgttggtacacctgtgaatatcttggaatcggtacaccggggtgtagatctttttgactgtgtgatgccaagccgcaatgcccgacatggccatctttttacctgggaagggatcattaatatccaaaatgctaagtatgtaacggatgaccgcccggtggatgccctttgcgggtgcccactgtgccgtaaccatacccgcgcctacttgcgccacctgatgcgtgccaatgaaatgcttggtatgcggctggctgtgatgcataacctgtggttctataatacactgatggaaaagataaggttagcactggatgagggacggtttgagagcttttaccgcgagcatgtgccaatactgggtaatagaatataa

SEQ ID NO: 29 - DNA, 1251 bp, Unknown
  Unknown gut bacteria
atgaaaaaagcatttgcactggcactggctgtgctgatggtgtgcaccatggcgtttgcggtttccaccgggaaccagactggctaccccggcggcacctccgcggccgataacacctacatgcagtccatcgtgcccggacagtctatcgtattcacccaggaagagctgggcctgactgaccagaactggggcaagaccaacggcagctttgaccccaagaagaataccgttaccctgaccgtccccgtaggcagcgatctcatcgccagccagggctgggtacggaccgatgagaccacctacaagtatgtggtgaccaccaaggccaatgagacctctgtactggataacaatgccgatatcatcatttccggcgtaaaggtcaccgtttacggtgtttccgctccggcgctgaatgtgagctatgtgaaggatgtaaacggcgtgaccaactatacctatgttaccagctttgatgagctggcgagcttctccgccaaggagccgggcgacaacttctgccccatgaacgccaagagcgaggaccacatcctggccatgtgcttcgactacggccgcaaggctgatgaggccgacgccgtatttggcgcgggcggactgaatgtcgccaacatggataagaccggtaaaatcctgtatactgtaaaggccgccaccgtagatggccagtacatcaccagcggcagctggaaccagtccgtcaccgaggataacggcggcaaggtcactgtttctgtcccgctgaaggccggcgacaagatctactttggcaccgtgaattacaccaccctttcccccgccgcccagaaggcgctgaacgacaacctaaccaaggccggcgcttccatcaaggcttcctacggctacggcgctgagcaggtcatcatcaaccgcccggcggagatcaccgtggacggcatggccaagggctacaatgcctacatggtccgcgaggacggctccctgcagagcctgagcgccaagtttaatgagggcactggtctgctgagctttggcggcaccctgaccggcccggtcatcgtgaccgataaggcactgaccgcgaccaccaccagcaatagcggcaacagcggctccaatggctccaacagcaatggcggcagccagaatcctgccaccggtgccaatgacatcgtaggcgtagcggccgctctggggggtatcaccggcgtttccgccgccgccatttccctgaagaaggactaa

SEQ ID NO: 30 - DNA, 1551 bp, Unknown
  Unknown gut bacteria
atgttaggttctcaagtagtcattctgataaccatagcggtatacctgattgccatggtgctcatcggtgtatactttggcaaaaagggcagcggcaacagcagcgatgacttttacctgggcggccgcaagatgggcccgctggtgacggccatgagcgctgaggccagcgatatgagcagctacctgctgatgggtctgccgggactggcatacctgtgcggcctgccggaggtttcctggacctgcatcgggctggcgataggcacctacctcaactggcttatcgtagcgcggcggctgcggcgctattcggcccgcattggggccatcaccgtgccggactttttctcccgccggtatggcgataagaaaaacctgctttccgccattgcggcggtggtaatcctggttttctttatcccctataccgcttccggctttaaggccatcggtacgctgttcaacagcctgtttggggtggattaccataccgcgatgatcgtgggcgctattgtagtcattggctatacagtgctgggcggttttatggcggtttccttcaccgacctgatccagtccatctttatgaccattgcgctgatcgttgtagtggtgtttggcatccaacaggcgggcggtgtggataccgtcattgccaatgccgaggcgctgcccggctacttgagcatgaccaagggctatgatgtgactaccggcggcgcggcttccttcggggggctcagcattatctccacgctggcgtggggtctgggctactttggtatgcctcacatcctgctgcgctttatggctatcaaggaggaaaagaagcttaacgattcccgtcggatcgcgaccgtctgggtggtgatctcgatgttcattgcggtggctattggtgtgattggttatagcgtttcggtggcgggcaaggtgcccttcctgaccaacagcagcgatgcagagacgatcatcattaagctggcggacctgatgagtcagcacggtaccctgctggccattgtggcgggcgtaatcctttccggtattctggcggcgacgatgtccaccgcggacagccagctgctgacagcggcttccagcgtttcgcaggatctttctcagaatgtgtttggcatcaagctgagcagcaagaccgagatgatcgtggcacgggcgacagtactggttattgcggccatcggtattactctggcgtgggaccccaatagctcggtattccgggtggtttcctttgcctgggcaggctttggcgcggcttttggcccggtggtgctgttctcgctgttctggaagcgcagcaacaagtggggcgccctggccggtatggttgccggcggcgtgatggtatttgtgtggaagtacctgattgccccgatgggcggcgcatgggccatctacgagctgctgccggcctttgtggtggcgtgcattgccctagtggtggtttctctgctgaccgaggccccggaaaaggaaattgtagagacctacgaaagcgtgtgtgccaagaaggtaaaggcgtaa

SEQ ID NO: 31 - DNA, 1146 bp, Unknown
  Unknown gut bacteria
atgtcaaagctgaataaaccgcaggccactgcccgtcccgcccgggaacccttcctctatgtcacccgtcgggatcagatcccgctgggccgggccattctcatccgggtcatcgccatcctgctggcgctcatcgtgtgcagtgtggtcacccgtgtcctcaccggggatgaccccctctccatctacgccaccatcctccacggcgcgttcggcaccggccgtatgctggtcaccctgcatgatatcgccattctgctgtgcatctcgctggcggtcaccccggccttccgcatgcgcttctggaataccggcgccgaaggccaggtgctcatcggctgcctttccaccgcggtatgcatgctggtgctgggcggcaaagtgcccgatggtctgctcatcctcatcatggcagtttccgccatcctctccggcgttatctggggcattatccccgccttctttaaggcccattggaacaccaatgagaccctcttcacccttatgatgaactatgttgccatccagctggtggaatacttcctcaaggtggcggataagaccggctccaatgttgtcggccccgatctgctcacccacggctggttcccggaaattttcggcgtcaagtatctgctcaatatccttatcgtcgccatcgtctgcatcgccatgcacatctacctgcggtacagcaagcacggctatgagatcgccgttgtgggcgaaagcgaaaataccgcccattacatcggcatcgatgtcaaaaaggtcatcatccgcaccatggctctttccggcgccatctgcggcctggccggtctgctgctggtcggcggctcctcccactccatcgattccaacctcgtggatggccgcggcttcaccgccatcatggtttcctggctcgccaagttcgatcccttcaccatgatccttaccacgctgctgctggtgttcctggcccgcggcgccgatgaagtcacctccaagtttggcctcaacagcgatttttccgagatccttaccggcatcatcttgttcttcatcatcggctgtgagttctttatcaattaccaggtccatttcaatcatcacaaaaaagaaaaaacggcgtcggccgccgtcagcggggaggggaactga

SEQ ID NO: 32 - DNA, 1200 bp, Unknown
  Unknown gut bacteria
atgaacaagaaaatttcgcttggcgcggccatcgcctatatggccatcgtagcggctgtggccttttcccttaccatgatctactcgatgaacctgttcaatgtgaagatgacaggcatcaccgaacgggaaaaaatgtacagctctctgcatgaggtagacctgtatgtgcgggaaaattactacggctccatcaatgaggaagcgctgcaggaggccattgcccgcgggtatatcgatggcctggaggacagcaatgcccgctacttcaccgctgcggaatatgaggcctatacccaatccggcagcggcaaatatgtaggcgtgggtctggtgaccgagatggattcctccggctatctgctggttcgggaggtttatcccgattctccggcgcagatggcgggcatcaaggtgggggcgcttattaccaatgtaaacggcacccgcgtgaccgaaaataacaatgaaagcatggcgggccgcctgcgtggcgaagccggcaccaaggtgactctgaccatccaacaggatagccaggagaacaactacgagctgaccctgcgcgccattgaggtgcccacagtaaaaacgaccatggtaagtgaagataccgcctatatcagctttaccgagtggagcggtaccactgccgaccagttcatcgcccagctgaatgccttgaaggcccaggaagtaaagggcattctgctggatgtacgcggcgttaccagcaatgagctttcctatgcggtccggctgctggatccgctgctgcccagcggtactgtggcctattcccgcgctaaggacggcaacctgaccgccgtggcggaatccgatgcgaacagctgggatattccgctggtggtgctggccgatgagaccaccggtggcaccacggagctctttgtgatggcgctgcaggactttggccggtccaaggtggtaggcgcccgcaccgccggcaacggcgatatcaccgagatcttcaagctttcgggtggttcggccatccaggtcaccacggcgcagtatgccgggcccaagcaaaagagctttggtgataccggtgtgggccccgactatgaagtggaactggcagccagcgagagtaaccggggtgacatcctgggcaacgctgaactggatgctccctataagaaggcactggaagtgctggcagcggccatccggtaa

SEQ ID NO: 33 - DNA, 3576 bp, Unknown
  Unknown gut bacteria
atgaagctgaaagcggtggaaatgcaggggttcaagtccttccccgaccgcacaaagctgaccttcgatgacgggatcacggtcattgtggggccaaacggcagcggcaaaagcaatatcagcgacgccatcaagtgggtgttcggcgagcaatcagtgaagagcctgcgcggcgccaagatggaggatgtgattttcggcgggtccatcagccgcaagccgaccggttttgcatgggtgagcctgtttattgataataccgaccgcagcattgatatcgacagcgatgaggtggtcatcacccggcggctgtaccgcagcggagaaagcgaataccgcatcaataataacccggtgcgcctgcgggatatcaacgagatgtttatggatacaggccttggacgggatggctattcggtcattgagcagggcaagatcgcggagatcgtgagcgcgaaaagcacccagcggcgggagatttttgaggaagccgccgggatctcccggttccgctaccgcaagaccgaagcggagcgcaagctgcagcaggccgaggataacctggtgcgcctgcgggatatcatgcaggagctggaggaccgggtaggccccctgaaggcccagagcgaaaaggccaagcagtatgtggtgctggccggggaaaagaagtcgctggagatcagcctgtggctggagcagctggccaaactgggccggcagctggcggagctggaggacaagaccctgctggctgctaatgaccgcaccaccgcccaaaggcggctggatgagatcgagcgggagctggcggagatccagcacaaaacacaggacgcgaacctgtatattgagcataagcgcgagcgcatcaaggagtttgaggacgcgatctccaacgctaaggtggaggcggcggtcaagcagaataccattgatcataataacgataccatcgccgagctggaaaaggagctggagcgcagcgagctttccgccggggagctggaggaaaagctgactgccctgcgggaggattaccaaaaccgcctggacgaggcccaaaagacccgcgaagccctggagggggggcaaaaggcgctggaggctcagcggcaggaggagcaccgcctggcggcggagcagagcgcgctggcgctgcaaaaggaggagctgcaggggcagatccaccgggcggagctttcggccgagacggcaggaacgctggccgaggaaacggtgacccgcctggaagcgctgcgcggacaggccaaggacaaggatgaaaatctgagccgcctgcgggaagaactggccggacataaggcctttgccgaagagctgcaggagcggctgcaaagcctgcagaacagcaagaacggctacctgtataagctgaaaagccgcagtgataagcaggccgaggcggagagccgccagcgcaacagcgaaaagctggcaggcgagaagctgcagcgtgcgcaggtgctctccgacctggaaaagaactacgagagctttaataacagcgttaagtttgtgatgaagcaggccggcgcgggtgccctgcggggcatcgtgggtccggtatccagcctgatcaagaccgaaaaccgctattccaccgcggtggagatcgcgctgggcgcggcgatccagaatatcgtggcgcaggatgagggcgcggccaagcgagccatcgcgctgctgaaggagcggggcgccggacgggcgactttcctgccgctgaccaatctcaaggcgaacccggtaagtgaaagcgacctggccgcccgaggcggctatgtgggcctggccagcgagctggtgcagtgcgatgaccgctaccgtgtggtgatggattccctgctgggacgcaccattgtggcggaggacattgacgccgcgactgccatcgccaaggcgtacagctaccgctaccgggtggtgacgctggatggccaggtggtgaatgccggcggcagtcttaccggcggttccgtcaataagaacgcgtccattctttcccgccggggagagatagacgccctgaccgcagaggcgaagaaatacgcaaagcaggcggaggagctggaggcccagctgaccgagctgcgccgggagaccgataccattcaggcgacggtggacggcatagaggccgaggaaaagaccgcgcgggaggatctcatttccgcccagacgctggtggaccgcctggccgccaatgtggaggaagccgagcgcctgaacgagcaggcgctgcgggaatatgatgacctgaccgcccgtatggagcagctgcgccagcagaagatctccggcggcgagctggtgaagaaactgaccgaagaggtggagcggctgaccaggctttcggccgagggtatggctgcccacgaaatgttgactgcggccatcaccgaagctgccgaaaaggtgactgccctgcagatggaggacatcgcccggcagaaggactgcgaagccgtccagatggccattgagcagatggagggccagcaaagcggcagtgaggccgccctggccgccttgcgggaacgacaggagcagctgaaaaaggataatgaggccatccgggaggagatcgagcagatcaccgccggggcgcaaagcggcagcagcgagatcgaggagctgcgcagggatatcaaggacgccgatgcacagcgtgaccagctggaaatgcgccgcaatatcctctccaaggaaaacagcgatgtcatctcccgccgggaggcggccgccagcgagctgctgcgcctgcaggaaaagagcgaaggtatgcaggagcagcagaacagcatcagcgccaagatgtgggaggaatatgagctgacccgcagcgaagcggccgaacaggccatcccgctggaggatgtgggggcggcgcaaaagcgcctttccgagctgcgcagcaagatacgggcgctgggtgccgtgaatgtggcagccattgaggaatacgaggaagtgagcggccggtaccgctttatgaaggagcagatagacgacgccgaaaatgccaagaaggagctgacacggctcatcaccgagctttcggcccagatgagcgcgatctttaccgagcgttttgcgggcatcaaccgctactttggcgagatcttccgggagctctttggcggcggacatgccgagctgcgcctgaccgatgccaccgatccgctggagacgggtatcgagatcatcgtgcagccgcccggcaagatcatcaagaatctttccgccctttccggcggcgagcaggcctttgtggccatctgcatctactttgccatcctgcgggtcaatcccgcaccgttcgttctcatcgatgagatagaggcggcactggacgatgtgaatgtcggcaagtttgccgcctacctgcaccgcatgaccgatcatacccagtttatttccatcacccaccgccgcggcaccatggaacagggcgatgtgctgtacggcgtcaccatggaggaggagggcatcagtaagctgctgcggctggatgtggccgagatggaaaagaaatttggcaagagcctgaactaa

SEQ ID NO: 34 - DNA, 1014 bp, Unknown
  Unknown gut bacteria
atgagtaaagtgttcattcctgcaggttaccacagctgcctttccctgtacgatacccaaaaggccatcagcctgatcaagcgggtgtttgaggatactctctgcggaaatctgaatctcagccgggtatcggccccgctgtttgtggaggcttccaccggcttgaatgatgacctaaatggagtggagcgccccgtttcctttgatgtgccggatatcggccgggatgcacaggtggtgcactccctagccaagtggaagcgcctggcgctgcaccgctacggcttccgtcccggcaagggcctttataccgatatgaatgccatccggcgggatgaaacgctggataacattcactccatctatgtggaccagtgggattgggaaaaggttatcacgccagaggagcgtaatgtggcctatctgaaggctacggtacagagtattgtggatgcgatcgtttccactcagcgcaccctgcgggccatatatccgcagctgaatacggttccggacctggtgccggaggtcaccttcatcaccacacaggagctggaagaccgttacccggagctgacccctaaggagcgggaaaatgccattgcgagggaatgcggcactgtattcctaatgcagattggcggtaagctgcgcagcggccagccccatgatggccgtgccccagactacgatgactggaccctaaatggtgatctgctggtttataaccgagtgctgggaacagcattcgagctgtcctccatgggcatccgtgtagatcctgcggcactggaccgccagctgaccctttccggctgtgaaaaccgccgtacattgcccttccaccggatgctgctggccggaaagctgccgctgaccattggtggcggtattggccaatcaagactgtgcatgttcctgatggggaccgcccatatcggtgaagtgcagtcttcggtgtgggatgacgataccatgcagaaatgcgaagccgcgggtattatcctgctgtaa

SEQ ID NO: 35 - DNA, 939 bp, Unknown
  Unknown gut bacteria
atgcacattacccctatgaaccccaaagcaaatccccctactgtttccgcttcccagtcccattcccgtctgcttgcccacctgatggcgctgatggtttccgccatttgggccaccacctttgtttgcagcaaggagctccttgcctattacagcccggcgcaggtgatgttcatgcgctttgccattgcctactttgtgctgtggctgctgcgccctcggccgctgccgtggcagggcaggggagagctcaccttcctgctattgggcattttgggcggcacgctctatttctttaccgaaaacaccgccctgaagcacacctttgccgccaatgtcagcatcattgtggcgatggcgcccatccttacctccatcctggcgcacttttttaccagggatgaaaagctccacaccaccgtttggatcggctttgccgtggccatgagtggtgtggtgctggtggtgctcaacggtgcgctggtgctcaagctcagcccggtaggcgatctgctggcctttttggcggcagccagctgggcctgctattcagtccttatcaagcggctttccggccgggtggacagcacgctgctggcccgccgggtcatcctgtacggcgcggttacctcggtgccgctgctggctgcccgcggggagctttcaatcgactttaccccgctggcacagccaaagccgctgttctgcatcctgttcttggcggtgctgggcagtgccgtctgctttgccgtgtggaatgttgtcatcgaccggctgggagtcgttcacgccaataactatatctatctccagccctttatcactatagtggcctcccatttcctgctgggggaacccatgagctggacggccattgtgggggcgctgcttatcattggcggcgttatcatctccggccggcaaaaacggccgcagtaa

SEQ ID NO: 36 - DNA, 1431 bp, Unknown
  Unknown gut bacteria
atgagaaagtttgataccaaggtgcaatacctgaaatacaaggtgctgcgggaggtggcccggcaggcctggaatgataccctgctggataatgtcatgtccattccgcgggagctggcgccccgcaatgccgagaccatctactgctgtgtctacaaggagcgtgccatcctgagcgaacgggtacgcatggccatgggcggcaataagcagaaccccaatgtcatcgaggtcattgatatcgcctgcgatgagtgtcccatgggcggctatgaggtcaccaattcctgtcgcggctgcctagcccgccggtgcgaggatgcctgccccaagggagccatcacattccacaaccatgtggctcacatcgataaggccaagtgtgtggactgcggtgcctgtgcccgggtctgcccttattccgccattgtagaccgcaagcgtccctgcgagaacgcctgcaagatcaaggccatcaccatgaatgagaataaggccgccgctattgataacaatacctgcatttcctgcggtgcctgcgtctatcagtgcccctttggcgccatcaccgataaatcctatatcctcaatgttattgatatgataaaaaagagcggggacaatgagaaataccatgtctatgcggtcattgccccctccatctccagccaattcacctacgccaagctggggcaggttgtcaccgggctgcatcggttggggttttactcggtggcggaggccgccctgggcgccgatatggtggccgatgccgaaagccgcgaactggtggaaaagggctttctgaccagctcctgctgccccggatttgtcagctatattgaaaaggccttcccggaattgaaaccttatatctctcacaatctctcccccatggccaccattgcccgctatctgaaggagcatgatgcaacggccaaggttgtctttatcggtccctgcacggccaaaaagggggaggccgccaagcaggaagtccgcccctatgtggatgccgcaatgacctttgaggagttacaggcgctttttgacagccgggaaatcgatatcactgcgctggaggaaggaatgctggatgaggcctcctacttcggacgcatttttgcccgctgcggcggtttggcggaagcggtggcccaagggatcaaggagcatggccacaccgatttcgagctgaaagcaacctcctgtgacggtattgaacagtgccgcattgccctgttcaagaagagtaaaaagctgctggatgccaatttcattgaaggaatggcctgcaccggtgggtgcatcggtggggcaggatgcctgacccacggcccccgcagccgtgccgaggtagataaatacgggatggaagccaacgataaaaccattaccgaggcgttggcagctctggagcctaagccctaa

SEQ ID NO: 37 - DNA, 951 bp, Unknown
  Unknown gut bacteria
gtgcggctgaaaccgaatacgctgattgtagtggcggggcccacggcctccggcaaaacagcgctggccatccaaatcgcgaaagcggtggatggagagatcgtttccgccgatagtatgcagatctaccggggagtggacattgccacggcaaagcccaccccggaggagctggcggcggtgcctcaccaccttatcggctttttgccgatggatcgggctttttcggtggcggattacgcggagttggcccgcaaggagatcaatgatattctaagccggggcaaggtgccggtgctgtgcggcggtacggggctttacatcaaggccattgtggacaatgtgcagtacagcgaggcaatcaccggcgatgaagcgctgcgggagcggctgcggcagctggcggagcgggagggcaatgatgtcctgtggcggcggctggaagcaatggaccccgaaacggccaagcgtatccaccccaataatgtgggccgggtcattcgggccattgaggtgatgacggtcagcggaaagtccatccgggaacacgaagccgaaagcctgcgggagccatgtccctatcatgtcattgagctggggctgcgctatcacgaccgggaaacgctgtatggacgcattaaccggcgggtggataaaatggtggagatggggctgactgaggaggtaaaagctgcccgggaacagggcctgaccgctaccgccgcgcaggccatcggctggaaggagctgtatagctggctggacggcaaagaaacccaggaggaagcgctggaaaagctgaagcaaagtacccgccgctacgctaagcgtcagctgacctggtttgggacggatcagcggatgcgctggatcgagctggacacgctggccgcgggggaaacgccgctggataaggcaatggagatactggaaaaggagggaatggcatga

SEQ ID NO: 38 - DNA, 768 bp, Unknown
  Unknown gut bacteria
atggggaaaatcatcgcgatcatcaaccaaaagggcggcgtgggaaaaaccactacggcggtcaatctttcggcggcgctggggcagctgggctgccgtgtgctgctggcggacctggacccgcaggggaacgccaccagcggcgttgggatcaataagcgggaagtgaaggtttccagctaccatgtgctgatggaggagagcggcgcggccgaggccatcctgcccacacggttcaaggggctttccatcctgcccagcaatatagacctggccggcgccgagatagagctggtggaaaaggaaaaccgggccaaatctctgcgggcggcgctgctgcgggtaaaggaggactatgactttatctttattgactgtccgccttctttggggcttatcaccgtaaatgccctgaccgccagcgattctatcctcattcccatccagtgtgaatactatgccctggagggtctgacccagctgatgcagacggtgcgtaccgtcaagcggctggataatagcgccattgccgtggagggcgtgctgctgacgatgtatgacagccgcctgaacctgaccaatcaggtggtgggggagatcaagaagtactttgcggataaggtgttccgctccacggtgccgagaagtgtgcgtatctccgaagcccccagctatggcgagccgatctgctactacgataaggcaaaccgcggcacgctggcctaccagcgggtagcggaggagctgctggagcgcaaccggaagtaa

SEQ ID NO: 39 - DNA, 564 bp, Unknown
  Unknown gut bacteria
aagcgcatggggagaccatcactggcggagcaacgccgtgtggaaatatgccgggcgctgcaaagctgtgtcatccgcaacggatcgtatgagatgacctcggtgaaggacattgcgcaggaggcgggtatggccgccggaatgctgcatcactattttgagagcaaggatgatattctgctggtgacggcggaaatggtgctgctggagctgcagaaccacctgagcgacctgctgcgcatcaaggatgccgcggagagagaaaagatgctggaggagctgctgggcgataacgagcagaaccggttttacatcatgctgcaggccatggctctggccatgccggcggtgaatgagctgctgcttggcaagcaggaggagatgcgggatatcctggcagaacggctggaattccgcgggagtgacccggaaaaggccaaagccgatgcggatcggatgaccttcctgctgtgcagcgcgctgaccacccccaagggcgtacagagcgccgccgcgcggcagatgacagcggatatcctgcaggagcttttcccattgggctaa

SEQ ID NO: 40 - DNA, 1404 bp, Unknown
  Unknown gut bacteria
atggaacctaaaagagcccaatggggcagcaagatcggctttattctggcggcagccggttcggccgtcggcctcggaaacatctggaagttccccggcaaggcttacgaaggcggcggcggagcgtacatcctcatctaccttgctatcgtactcctcattggcatcccggtcatgctctcggaactgaccatcggccgcggcgcgcaggccaatgccatcgatagctacggcaagctgggccaccctggctacaagtgggtcggctggttcggcgttatcgtggcgtttatcattaccagctactactgccatgtaggcggctgggtgctgagctatgtggccagctacgccaccgagcccaccaaggtttacgccgatccgctgggatatttctatgcgctgctgggctacaatgccgtcaccggggaaacatggttcccactgactgcagttatcttcgcgggtatctttatgggcattacctgcttcatcatcgtcaagggcgtggagtccggcattgagcgctttaataagatcggtatgccggcgctgtttgtcatcctcattattctgcttatccgggcgcttaccatgcccggcgccggggaaggcctgcaatatatgctgattccggattggagcaaagtcaccttcagcaccgtgctttcggccctggggcaggcgttcttctcactcagccttggtatggctattatggttacctacggctcctatgttaaaaaggaagaaaacctcgccaaaaacgccgctatcatctgtggtatggataccctggtagccctgattgccggctttatcattgttcccgccgtatttgctaccctcggcgcagaaggcgttggcaagggcgcaggctttgcgttctcttcgctggccggtgtgttccagcagatgcccggcggtcagttcttcggcatcctgttctacatgctgctgctgttcgcggcgctcacctcctgcatttccctagtggagggcgttgttgccttcgctactgagcgctttggatggaaacgcacccccacgaccatcattctgtgcgtggtgatgttcctccttggtaccatttatacctgctctcaggccgcctttgatatcaagggtatctggttcgacttcaagaacggtcttaccacccccatcttcggcgactttatggagttcctcaccgaccgtctgatgattcctgtgtgcgcactaggttcctgcctgtttgtcggttgggcctggaagccccaaaacgccatccgcgagatcgagctggacggcaagcccttccgtctgaagaaggcatacagcttcctggtgaagtatctggctcccatcagcatcattatcatcatcgtggccagctttgccaccggcactaccctcagctaa

SEQ ID NO: 41 - DNA, 1032 bp, Unknown
  Unknown gut bacteria
atggagctggatcccagaaaaagcaggatcctcacctgcgtggtggaaagctacatccgcaccggcgagcccatcggctccaagatgatcgccgccatgctggaggagactgtctcctccgctaccgtccgcaatgacctggcctacctcagcgagcagggctacatcgagcagccccatacctccgccggacgcatccccactcaccgcggtttgcgctactacctcgatcacctgatgaagccgcagccgctggaggacgccgcccgcggcgagattgacgccctgttcaattactgcgaccccgaccccgaccgcgtgctggaaggcgccacccggatgctggccaaggaaaccggctgctttgccatttccaccaccatctcccgccagagcctctttgtcaagcgcattgagatcattccggccacggcccacaccgtcgtcatcctgctgctgtgcagcaatggcatggtgaaaaacaaggtctgccgggtcaatttcaatctgacccccaatgtggtggacttcttccagagcttcgccaatggccgtctggccgggcgcagcctcaatgagatcaccgcccagtacatcaattcgatggcctttaccctgggtgagcacaccgatatctttgcgccgcttttggccgctatttacgagctgtgccgggaagcctgcgaaggtgccctgtaccgcagcggcacggggaatctgctggaacatccagagctgagaaatgtggccgaccggctgtaccgcctcctcgattcccgcgaggaaatgctgcggatcatcggcagccgggaaaatgacctgtttgtcagcgtggggcgggaaaatgcccgccccgaaatggagaattcctccatgatcgttgcccgttaccgcatcggtgaggattccatcggcgccctggggctggttggtcccgtccgcatggattacgcccggctcatcccccatgtggagtactttgccgggatgctgagccggatgctgagcgatacactgaataacggtctgtaa

SEQ ID NO: 42 - DNA, 870 bp, Unknown
  Unknown gut bacteria
atgaaccgaactgaccgtcctgcccgctgtgccgctgtgcacgatctttccggcctgggccgctgctccctttccgttattctgccggccatgtcggtaatgggggtgcaggtgtgcccgctgccgactgcggtattatccacccacaccgggggctttggcaccccggcccgtcgcgacctaaccgactacctgaccgaagcgctggcgcattaccgtacactgggtctgcccatggagtgcgtctacaccggctatttgggctcggtggcacaggttgcgctgtgccaggggctctttgcggaatggcccgcggccatgaaggtggtggaccccgtgatgggcgaccacggcaagctgtaccacggctttacgccggaactggtacagggtatccgggagctggccacccatgccgatgttatcacccccaacctgaccgaagcagcactgctgctgggtgaggagccgaatacggcccccctttcgctggggcaggcccgcagcctgctggcacggctttcggccctggggccgggggtagtggttatcaccggggcagcgcttaccaccggggaatatgccaacctgtgttatgatcgggaacgcggcggctactggaaatcggtaagcgaatacctgccggtgcgttatccaggcacgggcgatctgtttgccgcagtgctgacagccggcctgatgcagggcgacagccctgctatggcgatggaccgggcaacgaggtatgtggagatcaccgtaaaaacgacctttggctacggcgccgattctcgcgagggagtaatgctggagcgcacactgggctggctgacccaaaaggagctgccgcgaggctaccgcacgctgtaa

SEQ ID NO: 43 - DNA, 1818 bp, Unknown
  Unknown gut bacteria
atgcccggaggagaaaaagacatggatatttttgcgcttctgcggctggtactgggcctggcctttttcctgttcggtatgaatgtgatgtccagcaacctggaaaagatggcgggcggtaagctggagcagctgctgaaaacaatgacagcgagcccctgggtgagcctgctgctgggcgcggccattaccatagcggtgcagtcttcctcggcggtcacggttatgctggtgggtctggtcaattccgggatcatgaaatttggccagacgctgtatgtcatcttcggcgcgaatatcggcaccacgctgacggcgtggatcctctccctttccggcattcaaagcgggaatgtgtggctgaagatgctgaagcccgaaaatttctcgcccattttagccatcatcggcgtagtgatgatgatggtgtgtaaaaacgataagaaaaagagcattggtacggtgctggtgggctttacagtgctgatgtacggcatggtggtgatgagcgacgcggtaagcccgctggcggagatgccggagttttcggcgatcctagcggggctgcgtaacccgttactgggcctggtggtggccaccctgtttaccgccgtgatccaaagctcggcggcctcggtgggtattctgcaggcgctggcgctgaccggcagcctgacctatgagatggtcattcccatggtgatgggcctgaacattggcacctgcgccacctcgctgatttccagcattgggacaagctacaaggccaagcgggtggcggtcatccacttttccaccaaggtcattggtactgttatctgcctgccgttgtacctgttgatcacctcggtgcttcagcttgattttatccatattgcagtgacaccatggaatattgccatggtgcataccatctataacctggctattaccgccattttgatgccatttaccaagtacctggtgaagctgggcaagtggctggtgaaggccaaagacgaaacggcacctaaggactccatgcagtacgcgcctgacctgctgctgctccgctccccttcggtggcgctgcaggagtgtgaccactataccttccggatggccgggacggcaagggattcgctggaacgggcgatctcgctcatcggcgcctacaatgagcaggacgccgaggtggtactgaagcaggaggacacgctggatctgtatgaggaccggctggatacctacctggtgtacctttcggcgcaggcgctttcccagcaggacagccgccgcgtggggaaaatgcagcacgccatcggggactttgagcggctgggcgaccacgccgtaaacctggtaaaggccggtaaggagttggagatcaaatcgctgtttttctcggaggaggcccggcgggagttgggggtgctttccgctgcggtgcgggagattttgcagttgacaaccgattgctatatcaataccgaccatgagatggcccaccatgtggagccgttggagcaggtcattgacgcactgaccaaggagatcaagcagaatcatctggcgcgcctgcaggcgggccgctgttccatcgagctgggatttatcctaaccgacctgctgactgactacgagcggatttccgaccactgctccaatattgcggtggcggtcatcgagctgcagcacgacgcgctggactcccaccgctacttgaacgaaatgaagcgtgacagcgatgcgttccgggagatgtatgtgaaattcagggagaaatatacactgccggaatcggcctatattgccagacaggcggcggaataccgctga

SEQ ID NO: 44 - DNA, 1179 bp, Unknown
  Unknown gut bacteria
atgatcgatctgtttgaaaaatgccgcaaaccgtccctggccagcgagctcaaggaaaaaggcatctacccctacttccacgcgctggaaagccgccaggccccggaggtcatcatggagggccgccgccgcatcatgctgggctccaataactatctgggtcttaccacctgcccggaggtcatcgaagccgggatcaaagcgtttgagcagtacggcaccggctgctccggctcccgtttcctcaatggtacgctggaaatgcatttggagctggaagcggagctcgccaaattcctgcacaaggaggccgtcgtcaccttctctaccggcttccagtccaatctgggcatcatcagtgccattgtcggccggggcgatgttgtcatctgcgataaggaaaaccatgccagcatctacgatggctgcaaattgagctacggcaagatgctgcgctttgaccacgccgatatggaggatctggagcgccagctgcaaaaggtgccgcaaaacgccggctgccttatcgtcaccgatggtgtgttcagcatgggcggcgatattgccaagctgccggaaattgtacggctggccaagcagtacggcgcccgtgtcatggtggatgacgcccacggccttggcgttctgggcgaaggcggccggggcacggccagccactttggcctggaagatgaagtagatatctacatgggcaccttcagcaagtcgctggccagcctggggggctacatggcctcctcccatgaggtcgccgaatatgtccgccatgcttcccggccgttcatcttctcggcttccattacaccggcttcctgcgccaccgctttagcggcgctgcgctacctggaggcccaccccgagatcgtggatcgtcttaatgccctttcggcctatgcccgggacggcctgcggaaaaagaaggtcaagatcattgaatccaccacccccatcatcccgctgtatacctacaccgtggaaaacaccctgaccgccgcccgccagctgtatgatgccggggtctatgtcaacccggtgctgccgcccgctaccccccctgccgagtgtctgctgcgcaccagctacatggccacccttaccgaaccgctcatcgatgaagcggtcgagatcattggcagcgtgctgggggaaaaagtatga

SEQ ID NO: 45 - DNA, 1083 bp, Unknown
  Unknown gut bacteria
gtgaacggcatgatccccaaaaaagaatgggcgcaggacaccctgcggatgctgcttctattgggggcagcggtggccgtatgcagcgtgctttcccgcgtgcacgatgacaacaacccctttgccgttctcatctttgtgctggctgtcgccatagtggcactggtcaccaacggctatgtgtggggtgttctggcctcggtcatcggggtgttctgcgtcaattacatgttcacctaccccttttggagctttgatatgagcatcacgggttacccgctcaccttcgtggtcatgctggtggtctcggtggtcatcagcacccttaccactcgggtaaagcaaaccgaacgcctgcggtatgagatcgaaagcgaaaagcttcgggcggatcttttgcgggctctctcccacgatctgcgcacaccgctcgcctccattgagggtgccgacagcctgctgctggagcagcccgacctgagcgaagcggagcgccgtaccctgctggagcagatccgtcaggagacccggtggctgacccgcatcaccgaaaatatgctctcggtcacccgtatggccggggaacaggtaagcctgcaccgcaccgatgaggtagtggaggagattgtggacagcgccgtgatgaagctgcggcgcagccgcaatgccctgccggtcacggtcatccgcccgcaggagatcctgaccgccccgatggatgccaccttgatggagcaagtcattctgaaccttttggaaaacgcggtgaaccacgccgagggcgctacccgcatccgggtggagatcgccgggcagggggataccgtgatgatcgctgtggaggatgacggcgcgggcttccctccagagctgctcccccagctttttgaccgcaagctgctgccgcagccgcgctcctgcgctgatggccgccggggactgggactggggctcacgctatgcagcgccatcataaaagcacacggcggccgcatgaccgccgaaaaccgccccgagggtggagcgcgggtgtgcctgtggctgcctgccggaaccgaagatgaggaggaaaccgaaggatga

SEQ ID NO: 46 - DNA, 1086 bp, Unknown
  Unknown gut bacteria
ttgttcaccgaaagtccattgaattgcccccgggggtatactataatattcggtagagttccgataaggaggacaatttttgtgaaatacaccggtatcccctgcgcggcctgcggcaaaaagtttaccgcggaagacgatgtggtcgtctgcccggagtgcggcacgccctaccaccgcgcctgctataaagaactgggccactgtgttaatgaggcccgccatgccgagggctatgtgtggcagccgcccaaggccgctccggggccttctgtgccgctggaggagcagccgcatgccccccagaacaagacggacggcgaaggctatgtgatgtgcagccgctgcggcaccgtgaaccctgccggacaggagcgctgcgacctgtgcggctacccgctgaaggagaccggcgaacgcatcccggctggggaccgcgagaccgaggacggcgggacctttgcggaatatgtgcgcgaccagtacaatgtgaaccccaatgaaaagctgggcgatgaactgactgcccgggaggtggccgcctatgtgggacccaatgccctgaacttcctatacaaattccgggcgatgctgcagcgcaagaccgctgtgagctttaacctgggggcgttcctgttcaccgggctgtactgcttctaccgcaagatgtatgccctgggcggcattctgctggccataaaggccgcctgctatatcccctttgccatcaattatatcccctacttccaggagttgatggccgcgggggccaccaccctcagcgagtttatgcacatcaataccctttccccctactaccaggcgctggtttccacctccgccattgtgcagtacggcgggctggtgctcagtgtgctttgctccctgttcttcaattatttctatctcaagaagatcacccagcaggtccgcatccagcgctaccgcggccacgcagcggccggtacccagcagtactaccagaacctttcccgcatgggcggcaccagttggctgctggtattcctcatcgtcatcgggctgctttcggtctcttctgtcgtcacttccctttttgtgatataa

SEQ ID NO: 47 - DNA, 1239 bp, Unknown
  Unknown gut bacteria
atgcagatgctcattaagaacgcgaagctccgtgaccgggaagagctggtcaatatcctcatcgatggcggcaagatcgttgatatcggcgtgggactgaccgccgaggccgagaccgttattgacgccgagggcaacctgaccaccgcttcctacatcgatccccatatccacctggataaggtcaatgtactggatgttctgcccaagaaccagagcggcaccctgaaggaagccattgagatgctgtgggataaaaagcgcaactatgtcaatgaggacattctgacccgcggcggcgatgtggtggagcgtgagatcaagaacggtgtactgaatattcgtacccacattgatgtggataccatcaccggcctgaaggccaccgagggcgtactggccctgaaagacaagtataagggcgtagtggatatgcagaccgttgctttcccgcaggaaggcattatgaaggatcccggcgccgataagctgatgtggcaggccatggagatgggctgcgatgtagtaggcggtatgcccgctaacgaaaactgccctgacgacagccgcgcacatgtcaagctgtgctttgacatcgccgaaaaatacgatgccgatatagatatgcatgtggatgaaagcgacgaccccttctaccgcacgctggagatggtggccgatgagaccatcgcccgcggctggcagggccgtgttaccgccggccatacctgcgccatggcggcctatgacgaccactatgcggcctatgttatcgaaaaggtgaaaaaggccggcatcaatgtcatcaccaaccccgtgaccaacctgatgctccagggccgcttggataaacagcccatccgccgcggtattacccgcgtaaaggaactgctggctgccggtgtgaccatgagctttggccaggactgcgtcaatgataccttctatccctacggcgccggcgatatgctgcaggtggccctgattaccggccacgctgcccagctgagcctgcccgatgagattgaaaagaccttcgatatgatcaccgatgacgccgccaagatcctccgtctgaaggattacggcttgaaggtcggctgcaatgccgatatcgtcatcaccgcttgccgtgatgcacgcgacgccattcgtctgactccggagcgtcgctatgtcatcaagcgcggacgcgtagtggcttccaccaccgtccagtctaaactcgccatcttctaa

SEQ ID NO: 48 - DNA, 1221 bp, Unknown
  Unknown gut bacteria
atgctatactggctccataaaccggcatacctgccgggaaccggcaacaaacccgagaagaaggagaacattatggcagaaaccaccaaagaaaacaaagcccagcgggccaagaaatatcgccgcagaagagtgactgccgcagtagccgcagccgcgatgtgcgcggtcatcggtgtgggggtaaacggcgtagtgaccgcccgagccaataccgccctggcggatgcgctggctacggccgccgatctgcagcaggcgcagcaggaaagcgcccggcaggccctgcgggaaagccgtactgctgccgaggcagacctgaccgcctatgtgactgaagccagcgaagaggctgaagccgccctgaaaaaagccgctgaggaagccgccaaggcggccgcggccaaggccgcccagaccaccaacacctccaccaatgacagcaccgagctgcccggcaacggaggaaaactgagcagcggtggccgggctcttgccgccaccaaaaccggcgggaactttaaggccagcgtttataccggcaataccggtgcttccaacctgagctactaccagtcactgaacagcgatgtgaaggcctggcttaagatccccggcaccaacatcaattacccggtgctgcagaatgccagcgaggaccactactacctgcaccgcggcctggaccgcggccagagctactacggtgtgctgtggacccagaccgcgactcgctttggcagcggcgacagcctttccagcaacaatgtcatctatgggcacaactggaagaactgtcgctggaacgctgccccttccacctactatgccggtcagcagatgtttgaatcgctgctgagctaccactacaccagctgggcggagcagtatccctacatctactattccacccccagtgaggaaatggcgtttgttatctttgcctgcttctacaccgagggcagcgattggtatatcaatgccgagggtaatattgacggtgtgatcagcggcgcgcagagccgctcccgccacaattttggtgtggatgtcaactccagcgataagctgctgaccctttccacctgcacccgttactacggcaataccgataaccagcgctttgtggtgatggcgcgcctgctgcgcccgggcgaggagatgggccctgtttccgtcacctataatcccaaccaccagcagcccaatgtatggggctaa

SEQ ID NO: 49 - DNA, 1143 bp, Unknown
  Unknown gut bacteria
atgaaaaagcagaatattatcattatcatcgtttttggcgcgctgatctttgggctggggctgctggggtggctcaccccggatcaagccttttccgaaaatgagaaccgctacctgcaggagctgccaaagctttccgaagataccatggtaaatggagattttggcgatgaggtggaggattatttaagcgatcagttctggcagcgggatagctggaccgccgcccgcagcaaaatgaaaatgctgctgcgcaacaaggatatcggcggggtgtacctgtgtgaggatgggtattacatcgaaaaggtgacccaaaccgatgtggacgaagcaaggctgcaaaagaacctgcaaacggtgaaggatttctttacccggtgcgaggaaaaaggactggcggcagaaaatctgacctttatgccggtgccgacccccggctataccctgcgggataagctgccgcgttatgccaccctctttgatgaggatgcggtatttgacgagatgaagctggtatttgatgaccagctggtggacctgcgaacggactttgccaaggcggcagagagtgagcagctttattaccgcaccgaccaccactggaaaacggcaggcgctctgctgggctaccagtgctaccgcgcagccatggggctttcgattcccgcagcggcggattacaccgtagagcggtatgagggcttccgcgggacgctgtacagcaaggtgctggataaaaacgcggcgaccgataccgtagagctgtaccaccggaaaggcgatgccgccttgaccgtgacctacgataacgccgatcatgccagctgttatgatacagaaaaactccagcaaaaggatatgtacgaagtgttctttggcgggaactggcccgcggtgaccattaccggcggaccggaaaatggccgccgcctgctggtgctgaaggacagctatgccaatgccctgctgccctttgccgcagcggattacgaaaagatcgtggcggtggacctgcggtattatcttggctccctgagtgagctgatggagcaggaaggcattaccgatgtgctggtgctgtatagtacctccgcctttatgagcgacaccaagatagaccggctggcactggcaaaataa

SEQ ID NO: 50 - DNA, 1602 bp, Unknown
  Unknown gut bacteria
atgaagtacatttttgtcaccggcggtgtggtttcgggcttgggcaaaggcatctgtgcggcttccctgggcagattgctgaagcagtgcggcctgcgggtcaaaaatcagaagttcgacccgtatttcaatgttgatcccggcaccatgagcccctttcagcacggtgaggtctttgtgaccgaggatggcgccgaaaccgacctggatctgggccactatgagcggtttgtggatgaatccttggacggcaatgccagcgtttcctccggcaaggtcttttggacggtgctgaaccgggagcggcaggggggctatctcggcggcacggtgcagatcattccccatatcaccgatgagatcaagcggcggatctatgccatggaggatggcaacaccgatgtggtcatcagcgagatcggcggcacggtaggggatatcgaaagccagccctatctggaggccatccggcaagtagcggtggaaaagggccgggaaaatgtgctgtatatccatgttccgctcatcgtttccatccccggcaccggagagctgaaaagcaagccaacccagcattctgtcaaggagcttctttcggtgggcatccagccggatattctggtttgccggacggaggcgcccatcaccgaggaggtgcggcataaaatcgctctgttctgcaatgtggaggagcggtgtgtcatccccaatgtgacggcccatactctgtatgaagtaccgctgctgctggaaaaagagggcctgtgcgatgccgtctgccgccggctgggtctgggagaacggacccccgatatgaccgaatggacagccatggtggagaagataaaaggggtgcaccgccgggtggaaatcgccctggtagggaaatataccggcctgcgggatgcttacctcagtgtggcagaggcgctgttccatgctgggacggcctgtgatgccgaggtggagatccgttgggtggattccgaaaacttgaccccggaaaacatagcggaaaccctggtcggctgcggcggcattctggtgccgggcggctttggcgaccggggaatagagggcatgatcctggcggcccagtttgcccgggaaaaggggatcccctactttggcatctgccttggcatgcagatcgccgtgatcgaatttgcccggcatgtggccgactggcaggatgccaacagcgctgaattttccggttctaccgcgcacccggtcattgccctgatgccggagcaggtgggcgtgacccaaaagggcggcaccatgcggctggggcggtatccctgtgttttggcggaggggacaagggccctttccctgtacggggaaaaggagataagcgagcggcaccgccaccggtatgagttcaacaatgacttccggtgtgagctgcagcaggacggcctgacactggccggtacctcgccggatggggcactggtggagatcgtggagatcaaggaccacccatggtatgtggggtgccagttccatccggaattcaagagccggcccaaccgcccgcatccgctgttttacggctttgtaaaagcggcgttggaggcagaggaaaagcggtga

SEQ ID NO: 51 - DNA, 531 bp, Unknown
  Unknown gut bacteria
atgaagctgaatctgagagaaatcatagaaattcccggcggcagtgttccgtttgcgcaggagctggacacggccctgctcgactttccctccgtccgggcctacaccgcgccgatcacggccgagggcaaggtggtcaatacggccggcatcctcacgctgcagggcaaactgcacgcgcagatgctgtgtgtgtgcgaccgctgcggcgcggagtttccgcgcacggtcgacctcgacctgcacgccgacatcacggcggatgcgcaggacgacgatcctgaggtgtttacgctcgacggagactggctcgatgtggacgaggtgctctccaccagcttcatcctcagcatggataccaagtgcctgtgcaagcccgactgtgccggactgtgcgaccgctgcggcgcgaacctgaacctcgggccgtgccggtgtcaaaaaccccgcgatccaagaatggctgtattagagcagcttttggataataaaactgacgaagaagaggaagctgctcataacagcgactga

SEQ ID NO: 52 - DNA, 1779 bp, Unknown
  Unknown gut bacteria
atgaaattgagcggaaccattacaaaagtttccggtccgctggtcgtggccaatggccttgccgatgccaacgtctccgacgttgtgcgtgtcggcgagcagcgcctgatcggcgagatcctgaatatgaccggcgacagcgcgtccatccaggtctatgaggagacctcgggccttggccccggcgcgaaggtcgagaccaccggtatgccgctgtccgtggagcttggccccggcatgctggagaatatctatgacggtatccagcgcccgctgcccgagatccgcgacctgaccggctccaacatcacccgcggcgtcgaggtgcccgcgctcaaccgcgagcgcgtctggcactttgaccccgttgtgcagcccggcaccgccgtcaccggcggcgacgtgatcggcaccgtccaggagacgacggccatcctgcacaagatcatggtgcccccgcagatgaagggcacgatcaagagcatcaccggcggcgacttcacggtcgaccagaccgtcgctgtgctcacggacgccaacggcgtcgaccatgagctgaacatgatccagcgctggccggtgcgtatcgcgcgcccctatgcgcagaagttcgctccgaacaagcccatgaatagcggccagcgtatcatcgacacgctcttcccgatcgccaagggcggcacggccgccgtgcccggcccgttcggcagcggcaagaccgtcgtgcagcaccagctcgccaagtggtcggacgtggacgtcgtcgtctacatcggctgcggcgaacgcggcaacgagatgaccgacgttctcatggagttcccggagctgaccgacccgcgcaacggcgagccgctgatgaagcgcaccgtgctcattgccaacacctccgatatgcccgtggcagcgcgtgaggcgtccatctataccggcatcaccatcgccgagtacttccgtgacatgggctatgacgtcgccgttctggctgactccacctcccgctgggccgaggccctgcgtgagatgtccggccgtctggaagagatgcccggcgaagaaggctacccggcctacctcgcgtcccgcatcgcgcagttctacgagcgcgccggctgcatccgctgcatcggcagcgagggcgaccgccgcggctccgtcaccgccatcggcgctgtctcgcctccgggcggcgacatttccgagccggtctcgcaggccaccatgcgtatcgtcaaggtgttctgggcgctcgattcgagcctggcgtatgcccgccacttcccggccatcaactggctgacgtcttactcgctgtatgtcgactcgctcaagccgtggtatgaggccacgttcggcgaggaatatatggccaaccgcgacaaggccatgagcatcctgcagcaggaatccgacatgcaggagatcgtccgcctcgtcggccaggacgcgctgtccccggctgaccgcctgacgatggagacggccaagatgatccgtgagggcttcctgcagcagaacgccttcgtcgacatcgacagctactccgagtaccgccgtcagtttctgctgctcggtctcatcctgcgctacgacgccgagtgccgcgacgcactcgagaagaacgcaccgatgcacaagctctttgccatccctgcccgcgtcgacatcggccgcgccaagagcgtgccgagcgacgagtacgagcaggtctatgccaagatcgccgcggacatgaccgcgcagatcaaagagattatcgccggaggtgaggagcagtga

SEQ ID NO: 53 - DNA, 951 bp, Unknown
  Unknown gut bacteria
atgattgaaattgaaaagccgcgcatcgaatgccaggaatccccggacgatatctcgtatggcaagttcgtcgttgagcctttggagcgtggctacggcacgaccctgggtaactctctgcgcagagtgctgctctcttcactgcccggcactgccccgacgtccatccggatcgccggcgtgcagcacgagttttcgacgatccccggtgtcaaggaagacgtcacggagatcgtgctgaatgtgaaggagatcatcgcgcgcctgcactgcgacggcccgaagaccgtctatatcgaagcggcaggcgagtgtgaagtcacggccggcgacatcaaggcagacggcgaggtcgagatcctcaaccccgagctgcacattgccagcctcggcccggacggcgcgctctccatggagatcacgctcgcccacggcagaggctacgtcccggcggacaagaacaagagtgcgcagcaggtcatcggcaccatcccggtggacagcatctatgcgccggtcctgaaggtcaactacgctgtcgagaacacccgtgtgggcaaccagacggacttcgacaagctgaccatcgaggtctggaccgacaagaccatctcggcgcgcgacgcgctgagcctcggcgccaagatcctgtgcgatcacttcacgctcttcaccgatctgtctgacacgattggcaacagctgcacggtggtggagaaagagccggagcgccccgacaccgtcatgaaaatgacgatcgaggaactggatctctccgtgcgcagcttcaactgcctgaagcgcgcgaatatcaacaccgtcgaagacctcacgaacaagactgaggaagagatgatcaaggtgcgcaaccttggccgcaaatccctggaagaggtcgagcacaagctcgctatgatgggcctgagcctggcgagcgacgacaaccagtaa

SEQ ID NO: 54 - DNA, 3432 bp, Unknown
  Unknown gut bacteria
gtgtcagaaaaggttttcaacaaggtccttgccgccaaccgcggcgagatcgcggtgcgtatcttccgcgcgtgctatgacctcggcatccacaccgtggccatgtactccaaggaagacgaactgagtctgttccgcacccgcgccgacgaggcgtatctcgtcggtgaaaacaagagccctctgggtgcgtatctcgacatccccgagatcatcgacctggccaagcgccgcggcgtcgacgccatccacccgggctacggtttcctgtccgaaaacgcggactttgcccgcgcctgtgaagaggccggcatcacgttcatcgggcctccgagcgacgtgctcggcaaaatgggcgacaagctctcggccaagcagatcgccatggaatgcggcgtgccggtcatccccggctgctccgagcccctgcgcgacgggcaggaggcactcgagaaggccatcagcttcggcttccccgtcatcctcaaggcggcagccggcggcggcggccgcggcatgcgcctgtgcgagatgcccgaggacgtcatccccgcgttcgagctcgtcaagaacgaggcgcgcaaggccttcggcaatgacgacatcttcatcgagaaatacctcgtgcagcccaagcacatcgaggtgcagatcctcgccgaccagtacggcaacgtgcgccacctcggcgagcgtgactgctcgctgcagcgccgctaccagaaggtcgtggagtttgcgcccgcgtggagcgtgcccgagagcatccgcgagcagctgcacgccgacgccgtgaagatcgccgaggccgtcggctatgtcaacgccggcacggtggagttcctcgtcgaccgcgacggcaaccactacttcatcgagatgaacccccgcatccaggtcgagcacaccgtcaccgagatggtcacgagcatcgacctcgtgcgcgcgcagatcctcatcgccgaggggcagccgatcagccacccggagatcggtctcggcgaccagaacaacctcaaggtcaacggctacgccatccagtgccgcgtgaccaccgaggacccggccaacaacttcgcgcccgacaacggcaagatcgaggcctaccgctccggcggcggcttcggcgtgcgtctcgacggcggcaacgccggcacgggctcgatcatctcgccgtattatgactccctgctcgtcaaggtcacgagctgggactgcaccttccccgccgtctgccgcaaggctacccgcgccatcaatgaggagcacgtgcgcggcgtcaagacgaacatcccgtttgtgacgaacatcctcacgcacccgacgttcatcgccggcaagtgccacacgaagttcatcgacgagacgccggagctgttcgagttcaccgaatcgcgcgaccgcgcgacccgcgtgctcaaatacatcgccaacatccaggtcaacaatcccgacgccgagcgccaccagtacgacacaccgcgcttcccgaaggcgcagcgcgagatctcgaagcaggacgggctcaagctcctgctcgacaccgacggccccgaggccgtcaaggactgggtcctcggccagaagaagctgctcatcaccgacacgacgatgcgcgacgcgcaccagtccctgctgagcacccgcctgcgcacccgcgacatgctcaagggcgccgacggcacggccgacatcctcgccgactgcttctcgctcgagatgtggggcggcgcgacgttcgacaccgcctaccgcttcctacatgagtccccgtgggagcgcctggagatgctgcgcgagaagatcccgaacatcccgttccagatgctgctgcgcggctcgaacctcgtcggctacgcgagctatccggacaaccttgtgcgtgccttcatcgccgagtccgcccgcgagggcatcgacgtgttccgcgtgttcgactcgctcaactggctgccgaacatggagaccgccatggacgaggtgctgcgtcagggcaagttcctcgagggcaccgtgtgctacaccggcgatatcctcgacccgacgcgcgaccgctacacactcgagtactacgtcaacttcgccaaggagctcgagcgccgcggcgtgcacatgctggccatcaaggacatgtccggcctgctcaagccctacgccgccaagaagctcgtgagcaccctcaagcaggagatcggcatccccatccacctgcacacgcacaacaccaccgacaaccagatcgcgacctatctcatggcggcccaggccggcgtggatgtggtcgacaccgccatcggcccgctggccaacctcacgagccagccgtcgatgaacgccgtcgtcgagtccctgcgcggtcaggagcgcgacaccggctttgacccgcagcgcctgcaggagctggccgattactgggccgacgtgcgcctgcgctacgagagcttcgacaagggcctcaaagtgcccgtcaccgatatctaccgctacgagatccccggcggccagtacacgaacctgcagccgcaggtcgagtcgctcggcctcggccaccgcttcgcggaggtcaaggagatgtaccgcaccgtcaacatcatgctcggcgacatcatcaaggtcacgccgtcgtccaaaatggtcggcgacctggcgatcttcatggtgcagaatgacctcacgcccgaaaacatcgtcgagcgcggcgagaccctcgccttccccgacagcgtcgtgagctacttcaagggcatgatgggccagccgccctgcggcttcccgaaggatctgcagcgcgtcgtgctcaagggcgagaagccgatcaccggccgccccggcgacctgctgccgcccgtcgactgggatcagctgcgcagcgagatccgcaagttctacccgaactacgaggagccgcgctccctcatctcctacgccatgtacccgaaggtctatgaggagtacatccgccaccgcaaggagtatggctacatcatgcgcatgggcagccacgtgttcttcaacggcatggccgtcggcgagatgaacaagatcaacatcgaggacggcaagaccctcatgatcaagtacatcggcctcggcgaccgcaacgacgacggcacgcgcaacgtgcagttcgagctcaacggcatgcgccgtgaggtcgccgtgcccgatccgaccgcgaccgacacggccaagaccgtcgtcatggccgacccgaacgacaagagccaggccggcgcatccatccccggcatggtgtcgaaggtcaacgtcaagcccggcgatcaggtcaaggtcaacgacgtgctcgccgtgatcgaggccatgaagatggagacgagcgtcgtcgcccgcatggacggcacgatcgacgaagtctttgtcaagggcggtcagacggtcaaggccggcgagctgctgctgacgatcaagtaa

SEQ ID NO: 55 - DNA, 1236 bp, Unknown
  Unknown gut bacteria
atggataacaaaaagctcaagagcagctgggcagccgccttcaccgtggcgtctgtctggttcggcacccacgtgggcgccggctttgcgaccggcaaccaggtcgtgaactacttcgtccagtatggctggaccgcggcaatcttcccgctgctggccatgggcattctggccgtcgtcatgtacatcatgatgaagtttgccaagctcaacggtttcgacaactacaaggacacctatcgcgccctgtatccgaagccgtggatggagatcttcttcgagatcttttacatcatcatcatccttgcggcggtcgcgtcctgcgttgacggcgccggcggcatcgtcaagagcctgatcgacctgcccgatatcatctgcaacctcgtcatcatcgccctgctgatccttctgtcgatcttcggcgttgacctgatcatcaaggcttccaccgttctttccaccgcgatcctgatcgtcaccgcgatcctggtcatcatgggcttcgtcgttccgatcgacgcggttgcccaggagctggccactgagaacgcggcctacgcttccatcccggccatcgcggacgtcacctcccagaagggcctcgagggcgtctggcgcggcgtgttcgtgtacgctgctttccagtgcgtgtccgtcccggccatgatcgctgcttccaccgagctgacccacaagggcgtcaagcgcgccagcatcctcggctggctcatgaacggcggcgcgctcgccgcttccggcgccatgctgctgcgctggtacccggtcctctgcgccatcaagagcgttggtgttgactccgtcgccagcatcgccgcccgccacattgccgacgtcatgaagctccccaaccagagcgtcgtcaccctcatgggcagcggctacacctggctgttcgtcgtgtacaccatcctgctgttctgcgcgttcgtgtccacgtccgtcacgctcgtctactccatgatccagcgcttcgagggccactgcttcccgaaggccatcaagagcaaggctgtccgcagcgtcatcgtcggcctgatcgtcatcggcctgtgctacgcagtttccctgctcggcctgtcgaccatcatctccaagatctatggctatgacggctactacgctctgatcgttgttgtgctcccggcgttcatctggggcatcccgaagatcaagaagctgtctgccgacaagaaggcagagctgtcggagtga

SEQ ID NO: 56 - DNA, 1362 bp, Unknown
  Unknown gut bacteria
atgagtaaaagctccatcggtaccgagccggtgtacgacgcacgtacactcggcaagtccagaatgttcattctgggtctccagcacatgttcgccatgttcggcgcgaccgtcctcgtcccggcgctgtccggcctcgacgtcgcaacaacgctgctgttcgccggcctcggcacgctgctgttccacctgctgaccaagggcaaggtcccggccttcctcggcagctcgttcgccttcatcggcggctacaacgccgtgcgcaccatcggcacgaatccggacggctccgcgatctataataatgacctgctggcctacgcctgcttcggcgtcgccatcgcgggcctgatgtacatcatcctgtcgaccctgttcaaggtcttcggcgtcaagaaagtcatgcgctacttcccgccgatcgtcaccggcccgatcatcatcgccatcggcctgacgctctcctcttccgccatcaccaactgccgtgccaactggcttgtcgccgtcgtcgcgatcctgatcgtcatcggcttcaacatgtggggcaagggcatggccaagatcatcccgatcctgctcggcgtgctcggctcttacatcttcgcactcatcgttgatcccgcggagcgcgcctccgtcgccgctgccgtcagcagcgccaagtggtttggcctgccgatcttctggaaaaacagcgtgttccacctcttcgccggcccggtcgacagcggcgtcctctggtccgccgtgctgacggtcgtgcccctgtcccttgccaccatggtcgagcacatcggcgacatctgcgccatctcctccacctgcggcaagaacttcatggtcgaccccggcttccaccgcaccctgctgggcgacggcctggccaccaccctcgcttccctcttcggcgctccggccaacaccacctacggtgagaacaccggcgtgcttgccctgtcccgcgtctacgatccccgcgtgatccgcatcgcggcctgcattgcgatcgtcgtgtccttctgcccgaaattcgcggccctcgtgtccgccatgccgacggccaccatcggcggcgtgtccctcgtgctctacggcatgatctccgctgtcggcgtgcgcaacgtcgtcgagaacaaggtcgacttcaccaacacccgcaacgtcatcatcgccgcgctcatcctcgtgctcgccatcggcatcacctactccggcagcatccagatcggcatcgtatccctgtcgggtctggctgtctcctccatcgtgggcatcctgctcaacgccattctgcccggcaaggactacaccttcgagcaggacgataagggcgcgacctctgtggacttcaaggtctga

SEQ ID NO: 57 - DNA, 1776 bp, Unknown
  Unknown gut bacteria
atgtattacagcagcggtaactacgaggcgtttgcaacgccgaaaaaacccgaaggcatcgacaacaagtcggcatatgtcgtcggcaccggcctggccggtctggcggcggcctgcttcctgatccgcgatgcacagatgcccggcgagcacatcacgctctttgagcacctgccggtggccggcggctcctgcgacggcatctacgacgcgaccaagggcttcatcatgcgcggcggccgtgagatggataaccacttcgagtgcatgtgggatctgttcaagtccatcccgtcgatcgtgaacccgggcgagacggtcttctccgagtactactacctcaacaaggaagacccgaacttctccctgtgccgtgtcaccgagaagcagggccaggacgcccacaccgaccgtaagtacggcctgacgcccggcgccgccacccagctgctgaagctgttcatggcgaccaacaagtccctcgaggacaagaagatcgatgacgtgttcgacgatgagttctacgccacgaacttctggacctactggcagaccatgttcgcgttcgagaagtggcacagcgccctcgagatgaagctctacctgcagcgctacatccaccacatcgacggcctgccggatctgagcgcgctgcgtttcacccgctacaaccagtatgagtccatgatcctcccgatgtgcaaatacattaccgaccacggcggaaaggtcctcttcgacaccacggtcacgaacatcgtctgcgactgcaccgaggataagaaggtcgccaagaagatcgagtacacccagggcggcgtggaaaaggtcatcgagctgactgagaacgatctcgtcatctgcacgaatggctgccagggcgatgcgtccgcttacggcgatcagacgcacgctccggtcatcaaggtcaagaacggcgaaggcccgtccatcgagatgtggaagaagctcgccgcgcaggatccggcgttcggccatcccgagaagttcttcaaggacatcaaggagaccagctgggagtcctggaccgtcgacacggccaacaagcagatcctcgacgccatccagaagatctgcaagcgtgacccgctgtccggcaaggtcgttaccggcggcatcgtcacctgccgcgattcgagctggctcgtcagctggaccatcaaccgtcagggccagttccaggagcagccgaaggatcactgcctgatctgggtctacggcctcaactgctgggacgacaagggcgacttcatcaagaagaacatgtgcgactgcaccggcatcgagctggcggcagagtggctgtaccacatcggcatccccgaggatcagatcatggatctggccacgaacgaatgcaacaccacgccgtgcatgatgccttacgtcaccacgttctttgagcccagagccgaaggcgaccgcccgaaggtcgtgcccgatggttccgtcaacctcgcgttcgtcggccagttcgccgataccccgcgcgacaccgtgttcaccaccgagtactccatccgtaccgcgatggaagcggtctacacgctctgcaatgtcgaccgcggcgtgccggaagtctggggcagcgtgtatgatatccgcgacctgctctacgccaccagcaagctgctcgacggcaagaagccgctggagttcctgctcccgtcggttctgccgctgctcgacctcgtcaaggagccgctggtcaacaacgtcgtggtggatctgctcaagaagtataacatcgtctga

SEQ ID NO: 58 - DNA, 1080 bp, Unknown
  Unknown gut bacteria
atggcattgacgcttatgaagggtagcgaagctatcgctgaggctgcgatccgtgcaggcgcgcgttacttcttcggctatccgatcactccgcagacggagattcctgaatacatgtccgcacgtatgcccgaagtcggcggctgcttcctgcaggccgagagcgaagttgcggctatcaacatgatttacggcgcagccggtgctggtgcacgtgcgctgacctcttcctccagccccggtgtcagcctgaagcaggaaggcatttcctactgcgcaggcgcgcagctgccggctgtcatcctgaacgtcatgcgcggcggccccggcctcggcaacattcaggcttctcagggcgattacttccaggctgtcaagggcggcggcaacggtgactatcacctgctgacctatgctccggcatccgtgcaggaagcgatcgacatcatgatgtacgccttcgacaaggctgagaagtaccgtataccggtcctcttcctggctgacggcatcatcgctcagatgatggagcccgtggagatgcccgagatggtcgactacaagatcgacccggagaagaagccttgggcctgcaccggctggaaaccgggcgatgatccggcaaagcgcggcgtcatcaactccatctacatcgataccgagaccctgtccgtccacaacgacgagctgcaggcctgctatcgtgagatcattgccaacgagcagcagtgggaagagtacaacctcgagggtgctgagtatgtcatcaccgctttcggcacggttgcgcgtattgccaagtctgcgatcgttgagctcaaggagcagggcatcaacgttggtctggtccgcccgatcaccgtttggccgttcccgtacgacgccgtcaagaaggctgcggagcagccgggcgtgaaggctgtgctcgatgtcgagctgaacgaaggccagatgctcgaggacgtcaagctcgccatcaacggcgcaaagccggtcgacttctttggccacctcggcagccagatgccgaccaccgaagagatcaaggcgaagattatcagcatgaaggagggcaagtaa

SEQ ID NO: 59 - DNA, 1101 bp, Unknown
  Unknown gut bacteria
cgcccgacgtctgagacgctcttctgccagcactggagccacatcgtgcacagctggcgcgacctgccgtgcctgtataaccagtggtgcagcgtcgtgcgctgggaaaagaccacccgcccgttcctgcgcgggcgtgagttcctctggcaggagggccacaccctgcacgccactgaggccgaggcccgcaaggagacgctgcagatgctcgaaatttatgccgagacctgcgagcaggagctggccatgcctgtcatccgcggcaacaagaccgacaaggagaagttcgccggcgccgaaaacacctacaccatcgagtgcatgatgcacgaccacaaggcgctccagtctggcacgagccactacttcggcgacgggttcgcccgcgcgttcgacatcacctacaccgacaagaacaaccagcaggtctacccgcaccagacctcgtggggcctgtccacgcgcgtcatcggcggcatcatcatgacccacggcgacaacagcggcctcgtcctgccgccgcacatcgcgccgatccaggtcatcgtgctgcccatcgcggcgcacaagcccggcgtgaccgagaaggccgaggagctcgttgcgcgcctgaaggccgccggcctgcgcgcgcagggcgacttcagcgacaacagccccggctggaagttcgccaactgggagatgaagggcgtgccgctgcgcatcgagatcggcccgaaggacatcgaggccggccactgcgtcgccgtccgccgcgacaacggcgagaagatcaccgtcgcgctcgatgagctggaggcgcgcatccctgagctgctcgagaccgtgcagcagggcctgttcgacaaggccaagcgcaacctcgacgagcacacctatgccgcgcactcgctggccgaggccaaggaactgcaggagaaaaacggcggcttcatcaagaacatgtggtgcggcgacctcgcctgcgagctcgagatgaaggacaaggccggcatgtccagccgctgcatcccgtttgagcaggagcacctcgacgatgtgtgccccgtgtgcggcaagcccgccaagtgcatgatctactggggcgtggcgtac

SEQ ID NO: 60 - DNA, 999 bp, Unknown
  Unknown gut bacteria
atgaatctcaaaggcaacgattttctcaagctgctcgactacacccccgagcagatcgactatctgctccggctcgccgcccagctcaaggccgagaaaaaggccggcatcccgcaccgcctgtgcgagggcaaaaacgtcgcgctcatcttcgaaaagacgagcacgcgcacgcgcagcagcttcgaggtcgcggcgcacgatctgggcatgggcagcacgtatctcgactccaccggctcgcagatcggcaagaaggagagcatcgccgacacggcgcgcgtgctctcgggcatgttcgacggcatcgagtaccgcggcttcggccagtgcatcgtcgaggagctggcgcagtacgcctccgtcccggtctggaacggcctgacggatgagttccacccgacgcagatcctcgcggactttctgaccatccgggagcacttcggctcgctggagaacatccacctcgtctacatgggcgatgcgcgcttcaacatgggcaactccctcatggtcggctgcgcgaagatgggcatgcacttcacggcctgcgcacccaagggctacttccccgatgcgcagctcgtcgccgagtgtcaggccatcgcggcgcagacgggcgcgacgctcgacttcatctccgaccccgccgcggccgtgcagggcgcgaacgtgatctataccgacatctgggtctccatgggcgaacccgagagcgtctgggccgagcgcattgccgcgctcgcaccgtatcaggtcaacgcggcgctcatggccaaggccgaccccaacgccatcttcatgcactgcctgccggcgtatcacgacaaaaagaccgccatcggcaacgagatgtgcacgcgcttcggccgcgaggcgatggaggtcacggacgatgtgtttgaaagcgcgcagtcggtcgtgttccaggaggccgagaaccgcatgcacaccatcaaggccgtcatggcggcgacgcttgcggagatcgagctatga

SEQ ID NO: 61 - DNA, 771 bp, Unknown
  Unknown gut bacteria
gagcgcgtgcccgcgctggtcgaggccggtgtggacgtgctcgtgatcgactcgtccgagggctactccgagtggcagaagcgcacgctcgagtggatccgcgagcgctacggcgacagcgtcaaggtcggcgccggcaacgtcgtggacgcggacggcttccgcttcctggccgactgcggcgcggacttcgtgaaagtcggcatcggcggcggctcgatctgcatcacgcgtgagaccaagggcatcggccgcggccaggcgaccgccgtcatcgaggtctgccgcgcacgcgacgagtacttccgcgagaccggcatctacgtgcccgtctgctccgacggcggcatcgtgcacgatcaccacatcacgctcgcgctggccatgggcgcggacttcgtgatgctcggccgctacttcgcccgcttcgacgagagcccgtcggacaaggtcaacgtcaacggcacgctcatgaaggagtacaggggcgagggctccaaccgcgcgcgcaactggcagcgctacgacctcggcggcagcaagaagctgtccttcgaggagggcgtggactcctacgtgccctacgccggcaagctctccgacaacgtccagcagacgctggcaaaggtccgctcaaccatgtgcaactgcggcgcactgaccatccgcgagctgcaggaaaaggcgcggctgacgctcgtgtcctcggtgagcatcgtcgagggcggcgcgcacgacgtcgtgctcaagacctcgaacaagcccgtgtga

SEQ ID NO: 62 - DNA, 1026 bp, Unknown
  Unknown gut bacteria
atgaaagaaatgctgcagaagctgcgcgaggcttccgtcgccgccattttgcaggcggacgacatcaccgcgctggaaaacctgcgtgtgaagtacctcggcaaaaagggtgagctgaccgccatcctcaagcagatgggccgcctgtcggcggaggagcgcccggccatgggccagctggcaaaccaggtgcgcgctgagctcgaagaagcgctcgaccagcgccgcgagacgctcaatgcgcacatgctcgagatgcgcctcaaggccgagacgctcgatgtgaccatgcccggaaaagcgccggagctcggccaccagcacccgatgtatatcgtgctcgatgagattaaggacatcttcgtcggcatgggcttcgagatcctcgaaggccccgagatcgaagaggccgaatacaacttcaccaagctcaacaccagcgagggccaccctgcccgcgagtggtcggacacgttctatctgaccgaggacagcagcatcctcctgcgcacgcagacctccccgatgcaggtgcgcgccatggagagcaagccgctgccgatccgcatggtcgcccctggccgcgtctaccgcaaggatgaggtggacgccacgcactcgcccatgttccaccagatcgagggcatggtcatcgacaagggcgtcacgatggcggacctgaagggcacgctcaacacgctcgtgaaaaagctctacggtgagaacaccgtcacccgcttccgtccgcaccacttcccgttcaccgagccgcgctgcgagatggacgtgcagtgccacaagtgcggcggcaagggctgccccacctgcaagggtgagggctggatcgagatcctcggcgccggcatgatccatccgaaggtgctcgagggctgcggcatcgacacggacgtctactccggctgggccttcggcatgggcctggagcgtctggcgatgcgccggttcaagatcagcgacctgcgtctgatcttcgaaaacgacgtgcgcttcctgcagcagttctga

SEQ ID NO: 63 - DNA, 1935 bp, Unknown
  Unknown gut bacteria
gtgtatttcatgagttacgatgcattgttttctcccatcaagctcagagggcttgagctgaaaaaccgtgtggtcctgccgggtatgaacaccaagatggtcaaggacaagaacgacgtgggcgaggatctgcccgcctaccatgcggcgcgcgcagccggcggctgcggcctgaacattgtcgagctcgtctccatctgccccgagtgccatgcatacctgtacctcggtctttataatgagcaccacagagaccagctgcgcaagatcaccgacgcgatccacgcggccggcggcaaagcaggcgtgcagatctggcacggcggcttcgtgcccgaagagttcttcgacaagaccaacaagcttgagacgcctgacacgctgaccgtcgagcgcatccacgagatcgtcaagcagttcggctactccgccaagctcgctgtcgaggccggctttgacgcactcgagttccacggcgcacacacttatctgccgcacgaattcatgaacccctcgctcaacaagcgcaccgacgagtacggcaaccagagcctggagaaccgctgccgcttcaatctcgaggtcatccgcgagatgcgcaagaacatgccggaagacatgccgctgctcatgcgcctggacgccatcgacgagatgctcccggccgtgaccacgcaggacgagaccgtgcagttcatcaactgggccgccgaggccggtgtcgatgcgatcgacctgtcccgcggcaacgcccgcagccttgcgaccgtgtatgaagtgccgccctacaatctggagcccggcttcaacatggacaacatcgccgccatcaaggcgcgcgtgaacatcccggtcatcggcgtcggccgcatcgtcgaccccgctctggccgatcagctcatccgtgagggcaagatcgacatggtcgccgtcggccgtgcgcagctcgccgatcccgaatggtgcaacaagtccatggaaggccgcgaggcggagatccgccgctgcatcggctgcaccgagggctgctatgacaaggtcatcgacccgaaggccaagcacatcacctgcacccgcaacccggcgctctgcctggagtacaagggcctcccgaagccggagaaagccaagaacgtcatggtcatcggcggcggcatcggcggtctgatggcagccgagtacctcaaggctcgcggccacaatccgaccgtctatgaagccaccgacgccccgggcggccactttgtgctcgccggaaaggccccgaagaagcaggccttcaccgacgccgtcatgtgggacgctgaggagtgcaagcgtatgggcatcgagatcaagaccggcgtgaccgtcacgcccgagctcatcaaggaagtcaagcccgatcacgtgatcgttgccaccggcgcgcactttgtcgccccgaacatcccgggtctcgacaccgcgaaggacgtctacgtggctgaggacgtgctggccggcaaggccatgccgcacggtgaaaccatcatcctcggcggcggcggcgttggctgcgagaccgcgcagttcctcatcgagcacggcgtcaccgatgtgcgcgtgatggattccaagcgcgtcggcaacaagatgggcatgctgcgcaccatgttcctcgacatcgagtaccccggcgagaccatcaagaagagccgcggctctaaaatcaccgccgtcggcgatcacgagatcacctatgcgttcacgaacaaggccaagaagaccgtcgagaagacccgccactttgactccctcgtcatcgccaccggcatgcactcccgcccgacgcaggagctgaccgacgcatgcagcgaactcggcatcccctgcgacgtgatcggcagcgccaagaaggctgacatgggcatcgaagccaccgccgacgcttacgccgccgccatgaacgtctga

SEQ ID NO: 64 - DNA, 1275 bp, Unknown
  Unknown gut bacteria
atccaccagcacttcaagctggtcgacgtcttcaccgccgctgagaacatcacgctcggcctcgatgaaaagctcgatctcaaggccacggccgcgcgcatccgcagcatctgcgagcgctacggcttcgacctcgacccgaaccagaagatctacgatatgtccgtgtcccagaagcagacggtcgagatcgtcaaggcgctctaccgcggtgcggacatcctcatcctcgacgagccgaccgccgtgctcaccccgcaggagacggacacgctcttcgccgccctgcgcagcatgcgcgacgacggcaaggccatcgtcatcatcacgcacaagatgcacgaggtcgagacgctcagcgaccgcgtggccgtgctgcgccacggccagttcgtgggcgacatgctcacgaaggacaccaacgcgcaggaaatgacgaacatgatggtcggccacgccgtgacgctcaatattgcccggcccgaccccgtcgaccccaagccgcgcatcgaggtcaaaaacctcaccgtgcgcagcatcgacggcatcgtcaagctcgacgacgtgtccttcaccgccaactccggcgagatcctcggcatcgcgggcatctccggctgcggccagaaggagctgcttgaggccatcgccggcctgcagccgaccgaaaacggcagcatctgctacgtcgaggacgacggcacgcgcgaggagctgctcggcaaagatccgctgagcatcgccgagatgggcgtggcgctgtcctttgtgccggaggaccgcctcggcatgggccttgtcggcaacatggacctgtcggacaacatgatgctccgctccttccgcaagggccgcggcatcctcaccgaccgcaagtcgccgcgcaagctggccgagaccgtcgtcgaggaactcgacgtcaacactccgggcgtgaccacgccggtgcgccgcctgagcggcggcaacgtgcagaaggtgctcgtcggccgcgagatcgcctccgcccccaccgtgctgctcacggcctatgccgtgcgtggcctggacatcaacgcatcctacacgatctatgacctcatcaaccggcagaaggagcgcggcgtcgccgtgatctacgtcggcgaggatctcgacgtgctgctcgagctggccgaccgcatcctcgtgctctgcggcggcaaggtcagcggcatcgtccccggccgcggcgccacgaagcgcgacgtcggcatgatgatgacgcagttgggagggaacgaagcccatgcataa

SEQ ID NO: 65 - DNA, 270 bp, Unknown
  Unknown gut bacteria
atgcgtgcaatcgtaaccgtgatcggaaaagaccgtgtcggcatcatcgccgacgtgaccgccctgctggcgcagtacggcgtgaacgtgctggacatcagccagacggtattgcaggaatacttcacgatgatcatgctcgtggacgcagcgcagtgcaccgtgccgtttgcagacctcgcccgcacgctcgacgaggccggcacacagcgcggcctgcagatccgcgcccagcgcgaggacatcttcaacgccatgcaccgcatctga

SEQ ID NO: 66 - DNA, 1542 bp, Unknown
  Unknown gut bacteria
atgtcgttaccaatagcactcggttgtatcatcgcagcgcttgtggttggttgtatccttggcgggctttaccgcaaaaaggtctcggagcgcgagatcggcagtgcggaagagaaggccaagcagatcataaatgatgcctataagagtgccgagagcaagcggcgcgagaccctgctcgaggccaaggaagagatccacaagagccggacggagtacgaacgcgaggtcaaggaacgccgcgcggagctgcagaagcaggagcgccgcctccagcagaaggaggagaccctcgaccgcaaaacggacacgctcgacaaaaagacggacgccctcaaccagaagatcgccgcgatcgacaccaagcagaatgagatcaatcagctcaaaaagacccagatggagctgctcgagaagatctccggctatacggtcgaggaggccaaggccttcctcatcaacagcctgaaggacgacgtcgtgcatgagcaggcgctcatggtcaaggaggtcgaggcccagtacaaggatgaggccgatacccgcgcccgcgagatcatcgccaccgccatccagcgctgcgccgccgaccatgccagcgaagtgaccgtgtcggtcgtgccgctgccgaacgacgagatgaagggccgcatcatcggccgcgagggccgcaccatccgcgccatcgcgacgctccccggctgcgagctcatcatcgacgacacgcccgaggccatcacgctctcgagcttcgaccccgtgcggcgcgaagtcgcgcgcatcgcgctcgaaaagctcattcaggacggccgcattcaccccgcccgcatcgaggaaatggtcgccaaggctcagaaggaggtcaacgccaccatcaaggccgagggcgagcgcgccgttttcgagacgaacatccacggcctgcatcccgagcttatcaagctgctcggccgcatgaagtaccgcaccagttacggccagaatgtgctcaaccactccatcgaggtttcgcacattgccggcctgctcgctgccgagctcggcgtcgacgtggccaccgccaagcgcgccggcctcctgcacgatatcggcaaggccatcgaccacgaggtcgagggcagccacgtgaccatcggcgtcaacatcgctcgcaagtacaaggagtccgaggaagccatccacgccatcgagcccccccacggcgacgtggaggcccacaccgtcgtcgcctgcctcgttcaggcggccgacgccatctctgccgcgcgccccggcgcccggcgcgagaacatcgagaactatgtcaagcgtctcgaaaagctcgaggaagtcaccaagagcttccccggcatcgccaactgctttgccattcaggccggccgcgagatccgcatcatggtcaagcccgaggaggtctcggaggatcagatggtgctgctcgcgcgcgacatcgccaagaagatcgaggacgagctgacctaccccggccagatcaaggtcaatctcctgcgcgagaccaaggccatcgactacgcgaagtaa

SEQ ID NO: 67 - DNA, 1701 bp, Unknown
  Unknown gut bacteria
atgctgacaccctgggcggatacgctcgaccgcgcgcagcccctgccggagtatccccggccgcagatggtgcgcgacagctacctgaatctcaacggcccgtggagctacgcgatcacgacgagcgcgaacaagcccgcgcaggccgacggcacgatccttgtgcccttctcgcccgagagcgagctgtccggcgtgggacacgtcctgcagccggaggaatacctgtggtacatccgcacggtcacgctgccggacggattcaacgtcggccgtgtgctgctgcacttcggcgcgatcgaccagaccgcgaccgtgtggtgcaacggcgtggagctggccacgcacacgggcggctacctgccgttcacggtggacatcaccgaggtgctggccaaggaaaacacgatccttgtgtgcgtgcgcgacgcgacgaacaagtcccagctcccgcgcggcaagcagacgctgcacccgcacggcatctggtacacgccgcagagcggcatctggcagacggtctggctcgagagcgtgccgcagaactacatccgctccctgcacgtgacgccgctgtttgacgcgcatcaggtggagatcaccgtcgagggcgaaggtcagtgcacgatcgacctcgagggcaagcgcttcacgttccccgcgggcgtgccggcgcacgtgccggtgcagtcgtttcgcccctggtcgccggagcacccgacgctctaccccttcagcgtgacgctcggggacgacacggtctacagctactttgccatgcgcaagtgcagcgtcgagacggacaaggacggcgtgcgccgcctgtttctcaacggcaaaccgtattttcacaacggcctgctcgaccagggctactggccggacggactctacaccgcgccgagcgacgacgcgctcgtctacgacatccagctggccaaggacatgggcttcaacatgctgcgcaagcacatcaaggtcgagtgcgaccgctggtactatcactgcgaccggctgggcatgctcgtctggcaggacatgccctgcggcggcaggcgctacgacccgctcatcgtctcgaccccgctcgtgacgggctggcatctcgacgacagctggtatcccctcttcggccgcacgaacgtgacggcgcgcaaggcgtttttgaacgagctgcgcgacatggtcaccacgctctacaaccacccgtgcatcgccgtgtgggtgccgttcaacgagggctggggtcagtttgacagccagacggccgtgcaggtcatccggtccgtggacaagacgcgcacgatcgacccggccagcggctggcacgatcagggcttcggcgatgtgcgcagcctgcacgtgtatttccagaagtacaggttccagcccgataagctcggccgcgccacgctgctgtcggagttcggcggctatgtccaccgcgtcgagggccacgccatcggcggcaaaagcgtcggctacaagacgtgcgacgccccgctctcgctcgagtacgcgctccaggcgctctatgacgagcagatccgccccgccatcgcgcagggcctcagcgccgcggtgtacacgcagctgagcgacgtggagcacgagctcaacggtctcgtgacctatgaccgcagcatcgtgaagctcccggtacagacactgcacaaaatcttttatatcgaaaacgagtga

SEQ ID NO: 68 - DNA, 1884 bp, Unknown
  Unknown gut bacteria
atgcgtcagagaatcgaatccttggagcagttccgcgccctgcaggccgactacatggccgcgcgcgacgcggaaaaacgtaagatcctcgtctgctgcggcacgggctgtgtcgccggcggcaacctgaacgtctaccacgagctcaaaaagcgcatggacgagctgggcatcccgtgcgaggtgtccctgaccgagcaccacgccgacaccatcggcctgaaaaagtccggctgccacggcttttgcgagatgggcccgctggtgcgcatcgagccggagggctggctgtacacgaagtgtcaggtcagcgacgtggaggagatcatccagaagaccatcctcggcggcgagttcatcgagcgcctgggctacaaccagaacggcgagctgtatgagcgccaggaggacatcccgttttacaaaaagcagacccgccgcgtgctcgagcactgcggccatatcgacgcggaatccatcgaggagtacctgtccatcggcggctacggcgcgctggccaaggccctgttcgagatgcagccggacgagatcgtccaggccgtgagcgattccggtctgcgcggccgcggcggcgcgggcttcccgaccgggcgcaagtgggcgcaggtcgcggcacatacggaagagcccgtcaagtacatcgtctgcaacggcgacgagggcgaccccggcgccttcatggaccgctcctgcatggagggcgacccgcacaaggtcatcgagggcatgatcgtcgcgggcgtggccaccggctccaccgagggctacatctatgtccgcgccgagtaccccatggccgtgcaccggctcaccgtcgccatcgagcaggccaaggagctcggcctgctgggcgacaacatcctcggcagcggcttcagcttccatatgcacatcaactgcggcgcaggcgcgttcgtctgcggcgagggctcggccatgaccgcgtccatcgagggcaaccgcggcatgccgcgcacgaagcccccgcgctccgtcgacaagggcctgtacggcaagcccacctgcctgaacaacgtcgagacgtttgccaacgtgcccgacatcatcaaaaagggcgcggactggttcaaatccgtcggcacggagggcagctccggcacgaaggccttcgccctcacgggcaacgtcgtcaacaccggcctgatcgaagtgcccatgggcacgacgctgcgcgaggtcgtgtacgacatcggcggcggcatcaaaaacggcaaagcgttcaaggccgtgcagatcggcggcccgtccggcggctgcctgaccgaggcgcacatggacctgcccatggactttgactcgctgaaaaaggccggcgcgatcatcggctccggcggcctcgtcgtcatggacgaggacacgtgcatggtgtccatcgcgcagtttttcatgaacttcatctgcaacgagtcgtgcggcaagtgcaccccgtgccgcgagggcacgacccgtatgctcgacattctcacccggatcacgaagggcaacggccgccccggcgacattgaggagctgcgctccctcgccaagatgatccagaactcctccctgtgcggtctcggcaaaacggcgccgaaccccgtgctgtccacgctcgccaacttcgaggacgaataccgcgagcatatcttcgacaagaagtgccgcaccggcagctgccgcagcctgacgacgtatgtcatcgacccggccatctgcaagggctgcacgaagtgcgcgcgcaactgcccggccggcgcgatcaccggcgagctgaaaaagccgcaccacatcgacacagacaaatgcatcaagtgcggcacctgcaagactggctgcccgttcggtgcgatcaaggaggcgtga

SEQ ID NO: 69 - DNA, 1578 bp, Unknown
  Unknown gut bacteria
ggcggcctgcacggcgtcggcgcctcggtcgtcaatgcgctgtccgagtggctggaagtgaacgtgcacaaaaacgggaagatgtatcagatgaagttctcccgcggcgatatcacgcagcccatgaccgttgtcggcgagacggatcacaccggcacgaccgtgcgcttcaagcccgatcccatcatgttcgaggacacggtctacgactatgagacgctgcacgtgcgcatgcgcgagcaggcgtttctgaacgccggactgcgcatcaccatcaccgaccgacgcggcgaagagcccgtgagcgagtcgatgtgctacgagggcggcatccgcgagttcgtggacttcatcaacaaaaacaagacggccctgcaccccgaggccatctatatgtccggcgagcgcagcgactccatgtgcgagatcgcgctgcagtataacgacggctataacgaggtcatcgtgtcgttcgccaacaacatccacacgccggagggcggcatgcacgagaccggcttcaaggctgcgctcacccgcgcgctcaatgcctacggcaaaaagtccggtatcctcaaggagggcgacagcatctccggcgaggacagccgcgagggcctcacggctgtcatctccgtcaagctcacgaacccccagttcgagggacagacgaaggccaagctcggcaactccgagatgcgcacgctcgtcgattccgttgtgttcgaccgcctgtcgcagtttctggaggagaaccccgccgtcggccgtatgatcatcgaaaaagcgctcacggcctcgcgcgcccgcgaagccgcgcgccgcgcgcgcgaaaacatccgccgtaaaaacgggctcgagggcttcaacatgcccgacaagctgcgcgactgcaacgaccgcgacccgtcgctcaccgaactctacatcgtcgagggcgacagcgcaggcggctcggccacgcaggggcgcgactcgcgcttccaggccattctgccgctctggggcaagatgctcaacgtcgaaaaggcccgcgccgacaaggtctacggcaacgacaagctcacgcccgtcatcacggcgctcggcgccggactgggcgatgagtttgacatcaataagctccgctatcacaaggtcatcatcatggccgatgccgatgtcgacggcagccaaatccgcacgctgctgctgacgttcttcttccgcttcatgcgtccgctcatcgacggcggctatgtctactccgccatcccgccgctgtataagctcaaccgtggcaagaccacgcgcgtggccttctccgacgaggagcgcgataaaatttccgctgagatgcgcggcgacaacccgaacgcgaagatcgacatcaaccgcttcaagggcctcggcgagatggacccgcacgagctctgggagacgaccatgaaccccgagacccgcacgctcaagcagatcacgctcgaggacgccgtgcacgccgacgaggtgttcaccgtgctcatgggcgaaaaggtcgagccgcgcaaggcgttcatcgagcaaaatgccaagtacgcggtcaatattgatatttaa

SEQ ID NO: 70 - DNA, 348 bp, Unknown
  Unknown gut bacteria
gacgtgaccggccgtgtgcgcacgtacgaagccatcgtcaagggcgagaacatcccgcagccgggcgtgccggagtcgttcaaggtgctcatgaaggagctgcagtccctgtgcctggatgtgcgcatcctcgacgagaacggcgacgagatcgagctcaaggacgacgaggacgattacatcccgggtatgcgcgatgagatgtcctacaagtccgacgatgatgagatcaccggcagcggcttcacgatcgaggacgtaccggtggaggaagatgacagtctcggcgcgttcggcgatgccggcgacgatgactacacggacgattctgataaggaggaggaataa

SEQ ID NO: 71 - DNA, 1011 bp, Unknown
  Unknown gut bacteria
atgaaatttgcaatgtatggttccggcgcagccggcagcgtcttcgcttcttacctgcgtaagggcggtgcggacattatcctcatcgaccgctacgaagcccacatgaagaaggtcgccgaggaaggcatgcacttcaccatccatcaggaggaaaatggcggctacaaggattacgactaccagctcaagggcttccgcacctacaccaccgctgctgacgcggccgcggcggagggcaaggtcgacgtcatcatctacatgaccaaggcgacccagctcgagcaggccatccaggactccatgcccgtcgtcggcgacacgaccgtcgccgtctccctcatcaacggcctcggcaacgatgacaacctcttcaaggtcttcccgaaagagcgctgcattatcggctccggcgtgctgggcacggctctgcccgaacccgcacactgcgtgtccaccccggccggcggcgtgcagatgaacttcggcggtgcggtccgctcggagctcaccgacgcagcctgcaccgagatgctcaagtgctaccgtgacggcggttgcgacgcttactggcgcgacggcgagccgggcaccgacaacaacatctacaagttcatctggaaaaaggtctgcgtgaacgccactgtcaacaccgtgtgcgcggtcctgcgtctgaagatcggcgaggtcgaggcggatccgttcggccagtggctgttccacagcgtcatccgtgagacctgcgcggtcgcgaccgccaagggcgtgccgatggacgccgatgagttcatcgcccacgatcacaaggacatcgtcaccaacatcgcggactactatccgtccatgtgccaggacatgctcttcaaccaccgccagaccgagatcgacgtgctcaacggcaagatcgccgagtacggtgagcagctgggcatcgacaccccggtgtgcaaggtcctgtcccaggtcgtgcgctgcatccagggcaactacgacaagcagtacctgaagtaa

SEQ ID NO: 72 - DNA, 297 bp, Unknown
  Unknown gut bacteria
atgagaaccgcttacgatgtcattatccgtcccatcatcaccgagcagtccatggaagacctcgacatcaaaaagtacacgttcgaagtcgccaaggacgccggcaagatcgagatcaaaaaggccatcgaggagatctttgacgtgaaggtcatcaaggtcaccaccacgacgatccgtgccaaggagaagcgcgtcggtgccaacccctccggcatgaccgccaccggcaagaaggccgttgtgaaactgtccgctgattcgaagaacatcgagatcttcgagggcatggtgtaa

SEQ ID NO: 73 - DNA, 1113 bp, Unknown
  Unknown gut bacteria
atgcataacaaagtccgggaaccgctgttccacatcgtcaagcgcgacacgctgccctggtatcaggcctggggcatccgcgcggtcgccatcgtgctggcgctgctgctgtgcgcgctcatcacgacgctgtgcacccacctcaaccccatcaaggtgttcggcaccatgttcggcggcgcgttcggctcgccgcgcaagatctggatcctggggcagaacctcgccatcctgctgtgcatttcgctggccgtgacgcccgcgttcaagatgcgcttctggaacatcggcgccgagggccaggtgctcgccggcggcctcgccgccgcggcgtgcatgatctgcctcggtgacaagctgcccaacggcctgctcatcgtactcatcgtgatcgccggcatccttgcgggcgcggtctgggccgtcatccccgccatcttcaaggccaagtggaacacgaacgagacgctcttcaccctcatgatgaactacgttgccacgcagctcgtggcctatttcatcatcgtctgggagtcgccgaagggctcgggcaaggttggcatcatcaaccagagcaccgaggccggctggctgccgcagatcggcggctacaagtacctgctgacgatcctcgtcgtcgcggtgctgaccgtgctcgtctatgtctacctcaactacagcaagcacggctatgagatctccgtcgtcggcgagagcgagcgcaccgcccgctacgtcggcatcaaggtcggcaaggtcatcgtgcgcacgatgctgctgtccggcgcgctgtgcggcatcgcgggcgtgctgctcgtgtccggcacggatcacacgatcacgaccaccatcgccggcgggcagggcttcacggccgtcatggtctcgtggttggccaagttcaatcccctcggcatgatcttcacgagcttcctgctcgtgttcctcgaccgcggcgcgggcgagatctcgaccgtgttcggcctcaaccagtcgttcgctgatatcctcagcggcatcatcattttcttcatcatcggctgtgagtttttcatcacctaccggctgagcttccgcaagccggcaaagaaggaggcggcggagcatgtttga

SEQ ID NO: 74 - DNA, 1413 bp, Unknown
  Unknown gut bacteria
atgtcgaacagcaacaataaatataaaaccctcgtgtccaacaccatgctcatcagcctcggcaccttcggcagcaagctgctggtgtttttcatggtgcgcttttacacgagctatctcacccccgcggactacggcaccgccgacctcatcacgcagacggccaatctgctcttcccgctcatcagcctcggcatcacggacggcgtgttccgcttcgccgtggaccacaccgagcagcggcgcaacattttctccgtcggcgtgtatacgatcctggcgggcgctgtgctactcgtggccattttgccgctgctggggctcttcccgcagtttgacgggttcctctggctgatcgcgctctatacgatgtgctcgtgcttccactcgctgtgcgcgcagtttgtgcgcgccgagggacacacggcgctctacgccgtgcagggcatgatcaataccgtgctcgtcatcggactgaatgtgctcttcctcgtcggcctgcgcatgggcatcacgggctatgtgctctccgtcgcgctggcggatctggcgtgcacgctgcttttgttcgtgcgcgagcggctctggcgtcagctcatgctccgcccgggctgggcggccgcgcgcgagatgctggcctacagcatccccatgatcccgacgacggtgttctggtggatcacgagcgtgtccgaccgctacatggtcacggcctacctcggcgtggacgccaacggtatttacgccgtgtcgtacaagatgccgacgatcctgtcgctcgtgtcgagcattttcatggaggcgtggcagttttccgccgtgtccgaggcgcagggcagccggcgcgagcacatccgcttcttctcgaaggtctggtgctcgttccagtcggtgatgttcctcgccggcgcgtgcatcatcgccttcgccgtgccggagatccacgtgctcacgaccgagcagtattacggcgcgtggctgtatgtgccggtgctcggcatggccatggtcttttccgcgttcgtgagctatctcggcagcgtctacatggtcgaaaagtgcagcaagcgcacgttcaccacgtccatgatcggcgcgctgctcaatatcgcgctcaacttcctgctcatcccgtcgaagcttggcgtgcagggtgcggccatcgccacgtgtgtgagctattttgtcgtgtttgtcatccgggcggtggatgcgcgcaagttcatcccgttccggttttacgttgtcggcgtcacggaaaactgcatcctgctgacggtgcagacgctcttcatcgtcctgcagcttccgggctggaagatcgcgcaggcagtgtgcattttgctgctgctcctgctcaaccgcaagccgcttctggacggcgcgggcaagatcgtccgcttccaccgctga

SEQ ID NO: 75 - DNA, 687 bp, Unknown
  Unknown gut bacteria
atggaagtcatgtctgatctgctcatcaaactctggcaaaacggcatcttgcagctcggtatctgggagaccatttacatgacgctcatctccacgttctttgcctatctcatcggcctgccggtcggcctcatcctgcgcatgaccgaccgcgacggcatccaccccatcggctggctcaaccgcacgctcggtatcatcgtcaacgccctgcgcagcatcccgttcatcatcctcatggtcgccatgctgccggtggcaaaggccatcgtcggcaccagcctcggcaaccgcgccgtgatcgtgacgctcgtcatcgccgccgccccgtatgtggcgcgcatggtcgagtccgccgccaaggaagtggacgccggtgtcatcgaggccgcgctgtccatgggcgcgtccacgctgcgcatcatctggaaggttatcatcccggaggccaagcccgcgctcatcaccggcgccgtcatctccaccgtgaccatcctcggctactccgccatggccggcacgatcggcggcggcggcctcggccagattgccatcacctacggctaccagaagtacgacgatcagatcgtctggctgtgcgtagcgctgacgatcatcatcgtgcagatcctgcaggagttcggcatgtacatcgcccgccgcaccgaccggcgctcccgcacctga

SEQ ID NO: 76 - DNA, 696 bp, Unknown
  Unknown gut bacteria
atgctcatacacggcctgcaaaagctgacgctcctggattaccccggcaaggtagcctgcaccgtattcacagggggctgtaatttccgctgtcccttctgccacaacgcgagccttgtattaaggccagacgagggcgagcacatccctgaggaagagcttttcgccctgcttaaaaagcggcagggcgtgcttgagggagtatgcataaccggcggcgaacccaccctggccttcggtctggagacgctgatggcaaggataaaggagatgggctatcttgtcaagctggataccaacggcacccggccaaaggccgtaaagcggataatagacgcgggccttgcggacatgatagccatggacataaaaaacagctatgaaaaataccccgagacctgcggcatatccggctatgacacggcgccgataagggaaagcatacagctcataatgtcctccggcatagactacgaattccgcacaacggtaatgcgggaattccacacccccgatgatatccgcgccatagcgaaggaaattcaggccgcaaagggctacttccttcaggcctaccgggattccggcgacatactgaagggcggctgctcccgccccacggacggcgagctgcacgcgctgctttcagccgcaagggaatacctccccaatgcggagctgagaggtgtggaatag

SEQ ID NO: 77 - DNA, 723 bp, Unknown
  Unknown gut bacteria
atgaagatgagtagcctgcttgaaatacgcgatcttaaagtaaactacggcggcatagaggcgctgaagggcgtttccttcgacgtgaaggagggggagatagtcaccctcataggcgcgaacggcgcgggcaaatccaccacgctgcgggccataatgagcgtcgtcaaccccgcctccggagccatcagctacgagggcaaggacatcaccaacgccgccacacacgatatagttcagcgcggcatagagctggtgcctgagggccgccgggtgttcccgaaccttaccgtccttgaaaacctgcgcataggagcctatctccgggaggacaaggacgccatagagcacgacatagaacacgtgtacagcctgttcccaaggctgaaggagcgccactggcagcaggccggcaccccctccggcggcgagcagcagatgctggccgttggccgcgcgctcatggcaaagccaaaggttatgatgatggacgaacccagccttggccttgcgcctctggtggtaaaggatatattctccataatccgccgcatcaatgacgacggcgtgaccgtcctcctcatagagcagaacgccaacgcggcgttgaagatagccgaccggggctacgtcctccagaccggcaacgtgaccatgaccggcaccggcatggagctgctcaacgacgagagcataaaagaggcctacctcggaaagaaataa

SEQ ID NO: 78 - DNA, 477 bp, Unknown
  Unknown gut bacteria
atggaattcacccactttaaccatcagggccgggcccgcatggtagacgtgtccgaaaaggcggataccctccgcaccgccacagccagagcccgcgtgcttctcaatgccgatacctacgcactcgtaaagtccggcggcataaaaaagggggatgtgctcaccaccgcacagatagccggcataatgggcgcaaaacgcaccccggacgttatacccatgtgccatcccatagccctgaccggcgcagacatatgctttgagctggacgacgaaaaccacacaatagacatattcgccacgacgaaatgcaccggccccacaggcgttgagatggaggccatgacggcagcaagcatagccgccctgacagtttacgatatgtgcaaggcggcgcagcgggatataattattgaaagcatttgcctattgcgcaaggcggggggaaaatccggtgagttcaggaggaaggaataa

SEQ ID NO: 79 - DNA, 1056 bp, Unknown
  Unknown gut bacteria
atggcggatatactgaacaatatgatacccgtaaagcgcgccggaaggcagacggtgctgttttccaaccctccggcgataataagctcggctaccgttgtaggcccaatggagggcaagggaccgctggggccatactttgatatggtgctcaaggacgatacctggggcgaggacagctgggagaaggcggaacgcaaaatgttcgagcacactgtaaggggggcgatggacaaggtgaacctccaaagcggcggcgtggactgcctgctgggcggcgaccttctgaaccagataatctccgcaaactttgcggccagagaactgaaattaccgttcttaggcctgtatggcgcctgctctaccatggcggaatcactcctaataggtactatgctcatagacggagggtatgccggcagggtggcctgcatagctaccagccatttttccaccgccgaaaggcagtaccgcaaccctctggagatgggtggccagactacgccgacggcacagcgcacagtgaccggcgcaggctgcagcatagccgcaaatccgactctggaaggcgacagactgtatggcaatgtatttgtaactgcgggtacgataggcaaggttacggatctcggcatcaccgatgtcaacaatatgggagctgcaatggcgcctgcagcggtggacacgctgacagcgcaccttagcgataccggcaggggagtaatggactatgatttgatagtgaccggcgacctcggaagattcggcagcgagatgttcagggagctgtgcctgcaaaacggaatagacgtgggcaacaggcaccttgactgcggcaacctgatattctccggggagcagaaggtggactgcggaggcagcggctgcggctgctgtgcaagcgtgcttaacgcatacctgcttgagcgcatagaaaagggcgatctgaggcgcatattcttcatggcgacgggggcgctgctgagccctaccagcagcatgcagaacgacagcatacccggcatagcccacggtatagtgctggaaaggaagtaa

SEQ ID NO: 80 - DNA, 2667 bp, Unknown
  Unknown gut bacteria
ctgtcaacaggcagggcggtattgctggttgcgccaaacgaggtggcggcggtaaagctgcatgacgacatcgcctgctatgatataccctgcgcccacttcccgaccagggagatacccctgtccggcaagggctttgccgcccgtgacagcatagaggaacgaagggtagcggtgctgtctgcacttgccgccggcaagaccatgacggtggtgacatgcatacaggcgctgatgcagcgcaccgtggccccggagataatcaaaaccagcctgcacagctatgaggcggggcagaccatagaaccacgggatatggtatcggagcttgttatggcgggctatgagagggttgacgtatgcgaggcgccgggacaggtatgcctccgcggcggctatgttgacgtatatcctatcgccgctgaaaatcctgtgcgtatagagttttttggcgatgagatagatacgctcaggatatacgatccgcttacacagcgctctgtggataatgtggaccacatagacgtccctccggctaccgagatgcccataacagacgaggcaagagcgcgagcgctgaagcttctcaaaaagcgcaaggcggaggaactggcctcggcgctggaggaggggggcaggccggataattcagttgccctgctgcctctgttttaccccggggaagcgacgcttttcgattacatagacaaggactggataatactcatagacgagccggcccgccttgaggaaagcggaaagatagcctatcaggagttcctcgagggcgtatcctcgcttatgcaggcgggagagatacagccggagcaggccaaccttacggtatcccctcttgaaaccatcaagcgcatggataccagaaggaccgccatgatgttcgccctgacccgcagctacggccttatagggcagaggtgcatattcagattcgatacccggccggtttcgagatacgtaggccgggaggagctgctggccgaggatatagaggcgtggaaaaagagccatacgagcgttctgatatacgccggtacccacgccaaaaggcttcaggacagactgctggattcaaaccacatagtacctataaaggaaaagctggaccgggacattgtgccgggcgaggtgctgataatagagcagcagctgaaccacggcttcgagtacccggagctttcccttgcggtagtcacggaaaacgagctttacggagccgaaaaccgaaggcctgcggacaataagaaaaagcgcaggaagccgcagctggtgttcagcgagctgaacgtgggcgaccttgtggtccatgagcttcatggcataggtcggttcgtaggcgttgagacgctcacggtaggcggcgtacagaaggattatctgcatcttgtctattccggcggcgataagctgtacatacctacggaccagctggaccgggtgcagaagtacatcggcggcggagatgatgagggtacgcagcgcctttcaaagctgggcagcggcgaatggcagaaaaccgtatccaggacccgcgacagcgtaaagaagctggccttcgaccttgtgcgcctttacggcgagaggcagaaacgcaaaggctttaagttttcgccggataccccttggcagagaaagctggaggatagctttccgtatgagcctacgccggatcagctcacaagcattcaggagataaaggcggacatggagagcgacaaggtgatggaccgcctgctctgcggcgatgtggggtatggtaagaccgaagtagcgctcagggctgcctttaaggcagtgatggacggcaagcagtgcgcaatgcttgtgcctacaactatacttgcccagcagcattataatacgatagccgccaggttcgacggtttccccgtgaaggtggagcttctctcccgctttaagacccccaaggaggaggaaaagataatcgaggggctgcaaagcggcagcgtggacatggtggtgggcacccataagctgctctcaaagagcgtaaagttcaaggatctgggcctgctgataatagacgaggagcagcgcttcggcgtaggccataaggagcagataaagaacatacgccagtccgtggacgtgctgacgctttccgccacgcctatcccgcggacgctgcacatgtccatgacgggcatacgcgatatgtccgtgatagagacgccgccctcccagcgctatcccgtgcagacgtatgtaatggaatacagcgattctgtaatccgtgaggccatactgaaggagattggacgcggcgggcaggtatacttcgtatataacaacgtccgcagtatggagcagttcgcaggaaggctcagggagctggtgccggaggccagagtgtgctttgctaacgggcagatgaacgagcgggtgcttgaaaagaccatgctggaattcatggatcacaagtacgacgttttgctttgcagcaccataatagagagcggactggatatgcagaacgtgaacacgataataatatacgacgcggacgccatgggcctatcccagctttatcagctcaggggccgcgtgggccgcggggtgcggctcggctatgcctatctgacatacaggccgaacaaggccatgagcgagactgcggaaaagcgcctt

SEQ ID NO: 81 - DNA, 1113 bp, Unknown
  Unknown gut bacteria
cccaagggcatggtgctgcgcagcaccctgctcgaatactggcgcgaggtgcataaacgatacggctatgtggaaatctccactcctataattctcaatcaggagctgtggcacaggagcggccactgggatcactacaaggacaacatgtacaccaccgtaatagacggcgaggattatgcgataaagcccatgaactgccccggcggcatgctggtctacaagcttgagccccattcctaccgcgagctgcccctgcgcatggctgagctcggcctcgtacaccgccatgagctttccggcgcgctccacggtctgttccgcgttcgctgcttcacccaggacgatgcccacatcttcatgacctgggatcaaatggagcatgagatacagaacgtcgttcgtctgttcgacgaagtttactccaccttcggcctgacctatcagatcgaggtttccaccatgccggaggatcatatcggcgataaggagacctgggattttgccaccgataccctcaagaaggccatagagcatatgggcaagagctacgtcataaacgagggcgacggcgccttctacggccccaagcttgacttccatctttccgactccctgggccgtacctggcagtgcggcactatccagctggatatgcagatgcccgaaagatttgatcttgaatacgtaggcgaggacggccaaaagcaccgtcccgtaatgatacaccgcgtcgtattgggctccatcgagcgcttcataggcgttatcaccgagcacttcgcaggcgcgttccccacctggctggctcccgtacaggtgaaggtgctgccccttaccgaccgtaccgcccagatatgcgacaatatcgcttccgagcttgacgagcttggtctgcgtgtagaagttgatcaccgtaacgaaaagctgggctataagatccgcgaagcacagctccagcgtatcccctatatgctggtcgtaggcgaccgcgacgttgaaaacggcgttgtatccgtccgctcccgcaagggcggcgacctgggcgcaatgactctcgacgccttcaaggaaaagatactggaagaagtaaagaccagagcccgtgactga

SEQ ID NO: 82 - DNA, 1641 bp, Unknown
  Unknown gut bacteria
atggaagagatacgcgcgccaaagaactttatcgaggaattcatcgaagaggacataaaggaaaagggacttacccacatacagacccgcttcccgccggagcccaacggctacctgcacataggccacgcaaaggcgctggccatcgacttcaccatggctgaaaagttcggcggcagctgcaacctgcgctacgacgacaccaaccccaccaaggaggacgaggaattcgtggacgccatacaggaggacatagcctggctgggcttccactgggacaacgtattttacgggagcgactacttcgaagagtgctatgagctggcggtgaagctcatcaaaaaggtcgtggcctacgtgtgcgacctttcaaaggacgagatgagggaataccggggaacccttaccgagccgggcaggaactccccctggcgggacaggagcgtcgaagaaaacctcgacctgttccagcgcatgaaggacggcgaattccctgacggcagcaggacgctgcgcgccaagatagacatggcgtcgcccaatctcaatatgcgcgatcccgccatgtacaggataatacacatgacccatcaccatcagggggacaagtggtgcatctaccccatgtacgacttcgcccatcccatacaggacgcaatagagggcgttacccactccctctgctcccttgagtacgaggcccacaggccgctgtataactgggtcatagagcagtgcgaattcgagcacaagccgaggcagatagagttcgcccggctgaacctgaccaataccataatgagcaagcgctacctccgccggctggtggaggaaaagtacgtcgccggctgggacgacccccgcatgccgaccctgtgcgcgctcaggcgcaggggatataccccggagtccatactggacttcctgaatcgggtaggcgtggccaaggcggattccgtggttgagacagccatgctcgaacactgcgtaagggaggaccttaacgcccacgccccccgcatgatggccatactcgaccccctgaagctcatcgttgagaactggccggaaggcaaaaccgaggaggtggaggtggagtacctgcccgactgctccacaggcaagcgcagggtaagcttcggccgggagctttacatagagcgggaggatttcaactgcaacgcccccaagaagtatttccggctcaagcccgaatgcgaggtgcgtctcaagggcgcatacgtggtcaggtgttcccactgggacacagacgaaaacggcaatgtcaccacggtatactgcacctacgaccccgcgacaaggggcggggagtgcgagagaaagataaagggcaccatacactggctcaacgccaaggacgcgaagcccgccgagatacgcctttacgaggacctgctgctgcctgaggcggagggcgaggagaaggaatttacggagcggctcaatcccaattcgctgacagtcgtcaacgctctggtggagcccgagcttgcccaaaaggagccgggctaccgctgccagttcatgcgcaccggctacttctgcgccgaccttgactatactggggagcgccccgtgttcaacaggatagtcggcctcaaggacagctttaaggcataa

SEQ ID NO: 83 - DNA, 3201 bp, Unknown
  Unknown gut bacteria
gatttctccgtgacaaagctggacggcgctcccgcaggtgaagtacaggacttttattattacaataatgcaaacgcaaacagtgaaagcggcagccacaacgtgaatgagcttcacggcggcgccatgctccttgccgtgctgctaagcggcgtgctcggcgccatatgctacaggaagggcatactcaaaaagcccgagcccgatggggaaggcgtcaatgtctgcacgctgctcgtgctggcgtttcttatgcgctgcctgctgtcgctggtattttacggccacagcacggacataaactgctttatggcatggagctaccaccttgccgaggacggattggcgaacttctataacagcggtatgttcgcggattatccgcctgggtatatgtacatactctggcttaccggcagcatagccagagcgctcggccttgaatacggcggcgcgggatatgtgctgataaccaagatgccaagcatactggcagatatattcgctgcgtatatgacctataagctggcgaggaataagctgacagggagccagtcgacgcttttgtgctgcatagtggcgttcaacccggctatggcgttcatatccggcgcctgggggcaggtggacatgatacctgccataatgctgctgggcgtgatatatctatttgatagcggcaaactggagcttgcgggccttctttacggagcggctatcataaccaagccacagtctctcatgatagggccgctgcttgcggtggcatacttcgcgaaggtgtacgataagggctggaggtatgcccttcgtacattggcggcggtagcgttggctgtaatggccatattcgctctggcatggccgttcaagggggcgcagcagccgctgtggttcatggacaagctgctgggtaccgccacgtcctacccctatgcaagcgtagaagccttcaacatgccggcgctgctggggggcaactgggcagatgtgaacgcaccgctgctgggcctgacctatggcaaatgggggagcattatgatagcgctctcatgcatagccgcagccgcaggatacataaggtcacgggataaaaaatacagcctcactctgtctggggcgctgctgctctccggtatattcaccttcggccagtatatgcatgagagatatattttcccggtgctgccgctgctcattgcggctttcctgctgggcggggacaggggggtgataaagacgtatgtgatatatacctgcgctctgctgctaaacgtccttgccgcctttgtggtggtgaaaagcgcagcgctcaggggcgctgagtataatgtgataactctgataggctctgtgataaacctgatggcctttgcaagcatgattactgcctattggagcatgactgtaaggcgggagatatatcccgcatattgtgaggaaagaatggaaaagacggacggaaccgtatatgaaatacagggtgatacgcctgtcgttaccgtgagggacaggctgtactgctttgccctgacgctggtgtacgccataatcgccctgacgaacctcggcacaacgcaggcgcctgagaattactggataggcagcgttggtgatacggcggccataacccttgaaagccctgaagagataagcgagataaggatattcggcggaatatatgagggaagggcaactctttccttcagcgacgggcagagcatagaatacgttcaggagaacgacgatatgttccgctggataaccgtgagtggcgatgacgcggtttataccgataagataggcatagaggtaacggagggcagggtatggataaatgagatcgccctgttcgacggcgacggcaatataataaaatccgctgcgtccgaaggggcggaggctcttgtgaacgagcctgaggagataccggcaactccttcttacctgaacggaatgtactttgacgaactgtaccacggccgcacggcctacgaacacctgcacggcatagccccatacgagaactctcatccgccgctcggcaagatattcatcatgctgggaattgccatattcggcatgaacgccttcggctggcgaataataggaacgctgttcggaatagccatggtaccgataatgtacgccttcggcaaaaagctgttccgccgcagcgactatgcgctgctttccgccggcctgttcaccttcgacttcatgcactttacccagacccgcatagccaccattgacgtatacggggtatttttcataatactcatgtactacttcatgtatgactattactgcatgaacttctttgacgacggcctgaaggccacattgaagccccttgccatagccggcctgttctttggcctgggcgccgcaagcaagtggatatgcatatacgcaggcggcggcctcgcggtgatactatttacctcgctgggccagagatacgccgagtacaggcgcttcaaaaacgcccccggcaaggcggagcgccgcagggtgcagggcttctggcggaataccctaatgacgctgctttggtgctgtgtattctatatcgcggtgcctgtggtgatatatctgctgtcctacataccctatgtgctctgtgagaatcattacgggctcagcggtatatgggacttccagaaattcatgttcaactatcacagcggtcttaccgctacccatccatacgaatccccatggtggcagtggccccttgaccttaggccggtgtggtattacataagctacagggttccggaggggatgacttctaccatatccgcctttggcaacccggcggtagggtgggtgtgctcagcctgcaccggaatactctgcgcgcggctgatcgcgggcaggtctaagccggacaagggcatatttgtgctgctgatcggtttgggggcgaattacctgccctgggtgctggtaattcgctgcaccttcgcctatcacttttttgccagcgttccgtttatcgtattcataaccgtatggctgatacgtgaatttgacgagcggcaccctaaactgcgtcggatgaaatgggcgtatctgggccttgtggtgctgctgttcgcgctgttctacccggtgatatccggcgcgcctgcaagcatcggatacgtaagggcctttgagtggctgcccggctggacatttatggggtattga

SEQ ID NO: 84 - DNA, 1146 bp, Unknown
  Unknown gut bacteria
atggaaatcaccgttcaagagcttgctgctctcgaccccaagggatacgtgctgctggatatgcgtggttccgaggccagggagtacgggtcaatacccggctccgttggagtttccccggaggagctgtcccggtataacggcgataggggcaaaagggtgataatatactgtgcccgcggacaggtcagccttgacgcggccatagccctgcgggagagaagctatgacgcatacagcctctccggcggctatctcgcctggctgcaggacgagatggaacagcaggaggcggcagcgctgtgccgtcaggtcgaggaaagcattcgcaagcgcttccacagcaaaatctggtgctgcttcacccgggccatacgggagtatgagcttgtaaaagagggggacaggatcgccgtgtgcatatccggcggcaaggactccatgctcatggcaaagctctttcaggagttaaagctccacaacaagttccccttcgaggtggagtttctggtgatggatccgggctacagcccggagaaccgccgcgtaatagaggaaaacgccagaaagctcaacatacccatacacatattcgaatcaaacatattcgagtcggtttaccatgttgaaaagtccccctgctacctctgcgccagaatgcgcagggggtatctctaccgctacgcacaggagctgggctgcaacaagatagcattgggccaccactatgacgacgttatagagactatactcatgggtatgctgtggggggcgcaggtgcagaccatgatgcccaagctccacagcacaaacttcgagggcatggagcttatacgccccctttactacgtccgggaggacgccatcaaggcgtggcgggactgcaacggcctgcactttatacagtgcgcctgcaagttcacggacacctgtaccacctgcacaaataatgagacaaagtccaagcgcatggaggtaaagaacctcatacgggaaatgaaaaaaacaaaccccggcgtagaggcccatatattcaggagcatggaaaacgtcagtctggacgccgtcatagcctacaagactaagggaaggaaaattcattttttagataattatgacaaccctgacgaaggcattgaagaataa

SEQ ID NO: 85 - DNA, 654 bp, Unknown
  Unknown gut bacteria
atgataagcttttccgaccttttcaccatcacaatgaaccccgttcaggtaatactgaccctgatagttggcctgctcgtgggcctttacgtatggttcatatataaaaagaccttcagcggcgtcatgtattcccgcacctacggcatgacgctggtaatgatgaccatagttacggcgctgatgctgatgctcatcaacaacagcctgaccctcagccttggcatggtgggcgccctgtccatcgtccgctaccgcaccgccataaaggatccccttgacaccgccttcatattctgggcagtgggcgagggtatagccgtgggcacaaagttctacgacgtggccataatcgccggcataataataggcatattcgtgctgctgatctcaggctcaaggggcaagggtggcgctcagagctacctccttataatccactacagcgaggccgcggcagacgccatacgcaagatgaccaagcagcttcccggcgcccggctcaagagcaaggtagtgcgccccggcagcatagagcttaccatggagctgcgcctcaaggagaacgagacgggcttcgtagagaagttcctccgggtggagggcgtgtacgatgcaagccttatcactcatcagggagacatagtggcgtag

SEQ ID NO: 86 - DNA, 1848 bp, Unknown
  Unknown gut bacteria
atgcttcaggaaaagagcttgaatgatctcagggagatcgccaagcttcagggcgtaaagtcactcacaaaataccgcaagaacgagcttgtggacatcataatgaacggcggagcgataccctccgcggtgcagcagccagctgagccgccggctccccagctcgaagcccagcctgatccacagcccgccgcccctgcatccgggcagccaatacaggccgcagaacagccatctgaggaagcacacgtgcggcacagcgacgttctgcacgaagctcctgcacagccccgctctcagtatatacctgcgtatcaggcacagcagccccgtcagatgggctatcagcagcagtaccgcaaaccctatcaacagaattatcagcagcggcaggggtacggctacaatcagaaccgttatcagcagcagggctatcaggcatacaacagggactactcccagcagagttatcagccttcttataacagggactattcccagcagggctaccagcagccctcctaccagcagggctatcagcagcagagctatcaggccgcctatgagcagcagtccgaggaaagcttccgcaggccagaccgtcccgagggctactacaacaaagaatacggcaccagcaatcccgcagttcccggccttctcgagggcggagaatgcggcgattgcgaaggcgtacttgaagttctgcccgatggctacggcttcctccgcagcgacaactatctgccgggcaacaaggacatatacgtctccatcgcccagatacgccgcttcggcctccgcacaggcgatctcgtcaccggcaagacccgtccaagcaaggagggcgagcgttttctcgcgctgctgtacataacagccataaacggcattgatcccgaggaggccatgaagcgtaagccctttgaggagcttgtgcccatataccccaatgagcgtctcactctggaatatgacgacggcaccggcgcaaaggaccagaatctggccattcgcctggtagacctcatagcccccataggcaagggccagcgcggccttatcgtcagccagcccaagagcggcaagactacgctgctcaagaacatagccaacggaataaccaacaactatcccgacgttacccttatagtgctgctcatagacgagcggcccgaggaagtcacggatatgcagcgcagcataaagggtgaggtactgtactccacctttgatgagctgcccgagcatcatacccgcgtagccgaaatggcgcaggagcgcgctatgcgcctggtggagcagggcaaggacgtggtagtcctcatagactccataacccgccttacccgcgcctacaatattactatccccgccaccggcaagactctttccggcggtatggatccgggagctctgcataagcccaagcgcttcttcggtgctgcccgcaacatcgaaaacggaggcagcctaaccataatcgctaccgccctcatcgagaccggcagccgcatggacgatatagtttatgaggaattcaagggcacaggcaacatggagatacaccttgaccgcaagctctccgaaaagcgtatattccctgccatagacatctacaagagcggtacccgccgggatgacctgcttctctccccagacgaaatggacgcagtgtacatcatacgcaaaatgctgggcaacggcaatcccgcggagatcaccgagcagctcatcgccatgcttgaaaagacggaaaacaacaaggaattcgtcgccaagatacgggcatggaacagcgcctatgagaaggacggcttcaccacaggcaagaccttcaacaaataa

SEQ ID NO: 87 - DNA, 894 bp, Unknown
  Unknown gut bacteria
atgtgcgatcgtttttttatagtgaacccggtgtccggctccggcaagtcaaggaagctctttgaggagctgcttccccagatagaaaggagcggcaggagcttcgagtggcggtataccaccggcaagggccacgcaagagagttggcggaagaagcctccggaaaaggctgccaacgggtgatatccgtgggcggcgacggcaccgcaaacgaggtggccgcggcgcttataggttcggatacagagatgggaatacttccctttggcacaggcaacgactttgctaaggcggtgggcctgcccaccgatcccaatgcagcgctggaggcggcgctgtacggccaggtccggccggtggacgccgcaatggcaaacgacaagccctttataaacgtcagcggaacaggcttcgacgtggacgtgataatcaacaccgagaagtttaaaaagaggttcaacggaatgctgccctacatgctgggcatattccagagccttatgcacctcaagcccatcaccttcgagataacggcggacggggaaagctttaccgagcgggcgctgctcttcaacgcctgcaacggcacccatttcgccggaggaatgcacgttgcgcccatggcgagtccctatgacgggctgctcgacgtatgcatactgcgggccataagcataccgcagtttctcctgctgctgccccgctataccaggggcgcccacacagcttcaaggcacgtgcgctacttcaaggcgaaggaaatagcggtaaggtgcgacagcgaaaacataatcaaccttgacggggagctggattcctctacccccgtaacatttaaggtattgcccggggcgataaagcttgcgcttccgggagaaaaagggaacaaatga

SEQ ID NO: 88 - DNA, 792 bp, Unknown
  Unknown gut bacteria
atgaacgaattaaggaacaaaaagggttttatatgcgatatggacggcgtgatttaccacggtaacaagctgctgcccggcgtaaaggagttcgttgactggctgtacagggaaaacaagaacttcctcttcctcaccaactcctccgagcgctcacccaaggagcttcagcaaaagctcaagcgcatggggcttgatgtggacgagagccatttctatacaagtgcgttggcgaccgcacgcttcataagctcccagtcgccggaaagcagcgcctacgtaataggcggcgcaggcctcataatggcgctgcacgacgaaggcatcaccatgaacgacgttgacccggattacgttataatcggcgagggtaatacctacaactacgagaacatactgaaggcggtacacctggtgatgaagggcgcaaagctcatcggcaccaacagcgaccttacaggcccctctgagaacgggataatccccgcatgccgggcaatgatcgcccctatcgaaatggccaccggccagaacgcctatttcataggcaaacccaaccctcttatgatgcggacaggccttaggatactgggcgtacactcagaggacgcggtaatgataggcgatcgcatggataccgacatgatcgcgggaatcgagactggccttgacacctgccttgtgctctccggcgtgaccgaccgcgccgacatcaataagttcccctaccgtccgcggctggtgttaaacggggtaggcgatatacctgacaagtcaaaggaaatagtgtga

SEQ ID NO: 89 - DNA, 684 bp, Unknown
  Unknown gut bacteria
atgttcggcaagaaggagcttcagagggaacttgaacagaaggagcagcagatacaggagctgaaccgcaggatcaaggaataccaggacaaaaacgacgcggtagtaagcgccctcacggacgcgaagtccgccgcgaaccgcataattggcgcagcggaagcaaagcgcgatgatatcatcgccgccgccatgcgtgaaaaggccgatatggaggcccaaagggacggaatacttgacgaagcccgggcgcaggccgcggctatcgttgcagatgccgagaagagggcaaaggctgccgaggagcaggccaggtactttcaggattatatcaggaacaccgcagatacggtgcgccgccaagccgaaaactacgccggcttccttgaaaattacgagcatatcggcgtcggccagcagccggagacggaaaagatagatactccggacgagtaccggaaccctgcggagctcataaagagcatatacaatatcgagggccgggagcttcccgatgaggtgacgaagcccgacgcggggcaggagccagaggaggaaaaggtatggaccgtggacgaagtcgtcagcgaggaaaagcatgacgatgacgacgctgacaaagcagatgacggccttgacagcgagctcaacgacatactgaacgatatattaaagctggattga

SEQ ID NO: 90 - DNA, 1113 bp, Unknown
  Unknown gut bacteria
atgacagatccgaggatcaagacacttgcaaaaaacctcataggcttttcctgcgccgtaaagcccggtgaaaagatacttatcgagggcaacggcgaatgtaccgagctggtaaaagcgttggtcaaggagacctatgccgcgggcggcgtccccttcgtatggataaagaagcccgaggtatgccgggagcttgcgctgggcgcgacaaaggagcagcaggagcttatggcaaagatagactgcgagctcatgcgccacatggacgcgtatatcggcataggcgcgaagctcaacactaacgagatgtccgacgtgccgggggataagctggccctcataagcgccgtatacggcaggccgctgaacaacattcgcatacccaacaccaagtggtgcgtgctgcgctatcccaaccccaactttgcccagatggcaggcatgagcaccgaggccttcgaggacttctactttaacgtttgcaacctcgactatgctaagatggacaaggccatgcagcccctcaaggagcttatggaaaagaccgacagggtgcatatagtgggccccggcacagacctccgcttctccataaagggtatgcccgccataaagtgctccggccagatgaacattccggacggcgagatatataccgctcccgtagacggcagcgtagagggaacaataacctacaacaccccctccataatggacggcttcacatatgagaacgtcagcttgaccttcaaaaacggccgcatagtggaatccacctccaacgacaacgagcgcataaaggccgtattcgacagggacgcgggcgcacggggcgtgggcgaattcgccataggcgtgaacccctacgtcaccttccccatgagggacaccctcttcgacgagaaaatatccggatccttccactttaccccgggctgctgctacgacgattgcagcaacggcaacaagtcctgcatacactgggatctcgtatgcatacagacccccgaatacggcggcggcgagatgtacttcgacgacgtactgatccgcaaggacggcaggtttgtactgcccgagctggattgcctcaatcccgagaaccttaaataa

SEQ ID NO: 91 - DNA, 774 bp, Unknown
  Unknown gut bacteria
atgcttgtaaacactcccatagcaaacctctattcagggccttcggttggagagctggacgaccagatactctacggagaggaagccgatgtgctggagagaagcaacggctttgccaagatacgcacggaatacggctatgaaggctggatagaggaaaggcatcttgctatccggcggtatgacggcgcaataatgcgggtcgtaactcccttctgcacagtgctggatatacccaaatatcagggcaggacggtggtgacgctgccccggggcgctaaggtcgaaatgacgggtgagaataacagctttgcccaggtgcggctgataggcggagaaaagggctacatacgccgcagccatatagcggccctgccgggaaagctgagggaggctgagctgcgccgggccgtgacggagactgccaaagcatatcttggggtaccatacctctggggtggaagatcgtccgtggggatggattgcagcggcctgtgccatacggcatactggctcaacggcgtggccatataccggaactcacgcatggcggagggctttccggtgaaggcgatagacccggccaatatgaattcgggtgaccttctctacttcaagggacatgtggctatgtaccttggcggcggcaaatacattcacgccacagggagggccggtgacgacagggtagttataaacagcctttttccggaggacaccggttacagggaggacctggccaatggcctcgtcgccgtgggcagcgtattttga

SEQ ID NO: 92 - DNA, 1026 bp, Unknown
  Unknown gut bacteria
atggacgacagacttataacctcttccatgacaatggaggacgagcagatagaatacagcctgcgccccaggtttcttaacgagtacataggtcagcataacgtcaaggaacacatgcgcatatacatagaggcggccaagcacagaggggagcccctggaccatgcccttttctatggcccgccgggtctcggcaagaccacgcttgcggccatagtcgcaaacgagatgggtggcaacctgcgggtaacgtcaggcccagcaatatcccatgcaggcgaccttgcggccatacttacaaatctcgcccccggcgacgtgctgttcatagacgagatacacaggctgaattccagcgttgaggaagtgctctatcctgccatggaggattattccatagacataacaataggcaagggtccatccgcccactccatacgtctggatcttccaaagttcaccctcataggcgcgacgacgcgtatgggcatgctcacatctcccctcagggacaggttcggcataaaggagcagcttgagctgtacaacccggaggagctgaaggaaataatcgagcgcagcgcggatatactcaacgttaagatagacacagagggcgcccttgagatagcctcgcgctcccggggtacaccgcgaatagttaaccgcctgctaaaaagggtgcgtgattacgcacaggtgcggggcaatggcgagatagatcttgagacagcccgggctggcctggatatgctggccatagatgagatgggccttgacgctgtggacaggcgcatgctcgccaccatgatagaaaagttcggcggcaggcctgtaggccttgataccatagccgcggccacaggcgacgacgccaccaccatcgaggacgtgtacgagccatatctcatacagcttggcttcatcgcgagaacgccccggggccgcgtggtgatgccgctgggataccggcatatgggttacgcgccgccggctgatgtgggccaacagaagatgaatttttga

SEQ ID NO: 93 - DNA, 1182 bp, Unknown
  Unknown gut bacteria
cgggagcagacccttaaccagctactggtggagatggacggctttgcggtaaacgaaggcataatagtgcttgccgccactaaccgcccagacatactcgatcccgcactgctgcgtcctggcaggtttgacaggcagataaccgtgggctatcccgacgttaagggacgggaggccatactcgaggttcacgccaagggcaagcccctcgccaaggacgtggatctgggggtgctggcaaagcgcaccagcggcatgaccggcgcggatcttgaaaacgtgcttaacgaggcggccatacttgcggcccgcttcaagaagaaggagataaccatggtggagctggaggaggccataacccgcacggttgtgggccccgaaaagcgcagccgtgtagttaccgaggaggataagcgcatcaccgcctatcacgaggcgggacacgccatagtagccctgaagatggagcactgcgatcctgtacacgaggtatccataatacccagaggtcaggcggcaggctacaccatgaccatgcccgacaacgacgacagccacatttcccggggcaagatacttgaccagatagccatgagtatgggaggccgtgtggccgagagcatagcccttgacgatatatgcaccggcgccataggagatctcaagcacgccagcgaccttgaccgccgcatggtgatagagttaggcatgagcgacgagataggccccgtgttcctgggcggcgattccgaggtgttcatagcaaaggactggggacaccagcgcagctattccgaggaggtggctgccaaggtggacaaggagatacgcaggatactggaggagcagttcgagcgggcgaagcaggtgctgctccacgagcgggaggcgcttgatcgggtagtgaagtatcttatagagtacgagcgcataaccggcgaggaattcgagaagatattccataacgagcctgtggagctggtatcctataaagagcggaaggaagctcttgaaaagccggacgaggaggaaaagccggaggacgaatccgatgacaggacaggggatgagccggagcagcgccatgagggcagcggtgaggacagccccgaggataagcctgagaaagaggcggaacagaaattctaccggcccggcggattcgacggcgaggacaaataa

SEQ ID NO: 94 - DNA, 1248 bp, Unknown
  Unknown gut bacteria
atgaagatagcaatgcctgagcttctggctcctgccggaaatatggaaaggctgacagcggccatcgattacggtgcggacgcggtatatcttggggcgcagagcatgagcctgaggaattatgccgataactttacgccggagcagctcagggcgggctgcgaatacgcccacgggaggaacgccaaggtatacgtggcctgcaatgcattcgcgcgggacgaggaccttaaggatttgccggaactgctggcaaccatccggactgccggtgccgatgcgcttatagtcaacgatcccggcgtgatacgggtggcgcgtaaatgcgtgccggatatgccgctgcacttgagtactcaggcgaacactttgaattccgaggcggcgctgttctggtacgagcagggggtaaagcgcataatacttgccagggagctttccatcaagcagataaaggctatgcggcagagactgcctgaggaccttgagcttgagatgttcgtccacggcgccatgtgcgtgtcctattccggaagatgcctgctgagtaactacataaacggcagggactcaaacaggggcgaatgcgcccagccctgccgctggcagtatgaactaagggaaaagggctcaaagggcgagtactttacgatagagcaggacgagcgcggcagctttatcatgaactcccgggatatgcgcctcatagagtacataccggagatagtggatgcaggcataatgagcctcaagatagagggccgcatgaagtccatcgcctatgtggccaccgtggtgaacgcctaccgactggccattgacgagtataagcgcagcatcgacgagggcagggaatataaggtgcccgcttccgtgatgcgggagctggaacttgcgtcccatcggccctataccaccggctttgcatttggcgatcccggcgccgaaggtcaggagacccgcagcggcggttatgtagcggacggagccatagccgcggtggtgatatcctatgacggcaagactgggaccgcttttgtggctcagcgcaacaagttttatgacggcgaggagctttccatactttcccccggcgacataggccgcagctttaaggtgagcggcataacaaacgaggctggcgaaagggtgcagagtacgccgcatccaaaggagaagctgtatataggctgcaaacaggaattaaagcccggcgacatactccgaaagcttaccgaaaaaagataa

SEQ ID NO: 95 - DNA, 1386 bp, Unknown
  Unknown gut bacteria
gacaggcagtttcaccgcaacagcgtgctctcagaggtggagcgcagggtaagcgactttgttaccgccatggagggcgtatacagaaggtacgacaacagcaagttcttcttcgtgttcgaggcaaagcgcatagcggagcttgagcagcagcgctttacccttctcgacgaggtgcgcgagatagatacgggaaccggccagccggtaacgctctctatttccataggcgtggcggacaggatagccgcctcggacgaggcggcccgaaacggcatgcagctggtgctgggcaggggaggcgatcaggcggtggtcaagcggggggcaaactacgccttctacggcggcaagcgccaggtaaccacaaagaactccagagtaaaggcgcggcttttcgccgaggcgctgcatcagctgatggacaccgcggatgcggttttcataatgggccacagtctaccggatatggactgcgtaggggcgggcctcggcataatgcgctgcgccaagagcataagctgcccggcgtatttcgtgctggacgaatccaacgccagcattgatggggcgatagcggcaatgaaggaaaacaaggcctacagggatactataaagacgccggagcaggccgcccagatgatgcgctcctcctcgctattgataatcgtggacacccagcgcaaaagctcgctgctcagcgccgagctgctggaaaaggcgggcaaggcggtggtcatagaccatcacaggcgggctgtggactccatacagaaccctaccctcaactatcttgaggcgggatcctcctcggcctgcgagatggtgacagaggtgatacagtactttgacgacggcctcaagcccaccaccttcgagtgcggggcgctgcttgcgggcatcactatggatacaaagcatttttccttcaataccggagcgcgcacctttgaggcggcaagctatttaaggcgcaacggcgcggacaacaccaccgtgaagatgatgttccaggacgatatgcagacctaccgcaacagggccaaggtagtggaaaacgccataataatggagcaggggatagccatatccgcatgccccgcgggcatggaagccaccaacctcatagccgcacaggcggcggacgagctggtgaacataaagggtattcaggcttccttcgtgcttgcggagcggggccaggtgatatacataagcggcagaagcctcggggacatcagcgtccagcttatacttgaaaagctggggggcggcgggcatcagtccattgccggcgcgcagctgaaggacgtgactatggacgaggccataagcaggcttacggaaagtataaacagctatttaaaggaggcacacgagaaatga

SEQ ID NO: 96 - DNA, 1035 bp, Unknown
  Unknown gut bacteria
atgaagctcacccttatacctgcacagtacctggagcaaagcatccaataccctgagctttccctctgccggatagtttcccaggaaaagggcttgtaccgcatcataagcgccgaaggggatcagctggcgtcggtatccggtaaattccagcatgaagcagcctccccttcggattaccccgttgtgggcaactatgtgatggcagccctaaacggcggagcggccgttataaaccgtgtgctgccccgtaaaagcctgtttctccgtaaatcggcaggcacagccaggatggagcaggccgttgccgctaatattgacaccgtattcatctgcatgtcgctgaacagcgactttaacctgcgccgcctggaacgctacttatccgttgcgtgggaaagcggttccctgcccgtagtggtgcttaccaaggccgacctttgcgataatcccgcagtaaaggccgcccaggccgccagcatcgctatcggggcagatgtacttgtcacttcttccatggcgctggacggctataaccagatactgccctatatctcccaaggaaagacagttgccttcgtaggttcctccggcgtaggcaagtccaccctcatcaaccggctgctgggcgaggacaggcaggataccggcggcctcaggaacgacgacaagggccgccacaccaccacccacagggagctgctgatgcttcccaacggcgcagcggtgatagacactcccggcatgcgggagcttggcatatgggacgcctccattggcctcagcacagccttcagcgatatagaggagctggccgcccaatgccgtttcggcgactgcacccataaaaacgagcccggctgcgcagtgcgttccgcgctgcaaaggggcgagctgtcagaggagcgctttttgtcttatgaaaagctggcgttagaaaacgcctatgcagccggccccacaggcagccgcgccgcaaaggagcgtaaattcaagagcatagcaaaattcaacaaaactaaaccaaagagataa

SEQ ID NO: 97 - DNA, 870 bp, Unknown
  Unknown gut bacteria
atggaaaacgtggatttgctcacacggataaaccagcattacaattctttcagcaaggggcagaagctgcttgccaactacataatagacaattacgacagggcggcgttcattaccgcatcgaagatgggccgcactgtaggcgtaagtgaatctacggttgtccgctttgcatatgctttgggttatgacggatatcctgcgctccagcgctcccttcaggaaatgatacgcaaccgtcttactacggtccagcgtatacaactcacatcggatctttctcaggacgaggtcctttccactgtattgaaatcagatataagcaatatcagatccactatagagtcggtaaataccgctaccttcaataccgtcatagactacatgctcaaggcgcgcaagatctatgttgtaggtataaagagtgcggcgccgttagcacaattcctggggtattatctcaacttcatactggacgatgtatgcatcgtcaacagtaccgtatatgaaacgatgctgcgcataagcgacaaggacatgtgcataggaataagcttccccagatactcctctaaggcggtggaagcgctgagcttcgcaaggagcaagggcgcatatgtgacggccataacggacagcatgttttcccctatagccgagcttgcggacagcgtactggtagcgcgcagcgatatggcttcctttgccgattctctggctgcccccttgagccttatcaatgcccttatagtgggtgcgggccttcgcaggaaggacgaggtgtacgagagattggatcagctggaaggcatatggaagagccacaaggtgtatatagcgtccaatacagacgatagggataacgaatga

SEQ ID NO: 98 - DNA, 1017 bp, Unknown
  Unknown gut bacteria
ttgaaaggagacggaataatgtctatcatcgacaccatcaaagcaaaagcaaaagctgacgtaaagcacatagtgcttcccgagggaagtgaggagcgtaccgttcaggccgcaaggctgataaccgatcagggcatcgccaaggttacccttatcggcaaaagcgaggatatcaaggctgccgctgccaggttcaacgtgaacgtggacgacattgcaatgatcgacccggctgcctctgagctgtatcccggatactgcgagaagttcgctgaaatgcgcgcaaagaagggcgttacccttgagcaggcgcagaagaccatgctcgaccccctgtttttcgccgctatgatggtttacgatgacaaggctgacggcttcgtttccggcgctataaatacaaccggcaacacactccgccccggcctccagataataaagaccgcaaagggcgtatccaccgtttccagctgctttatcatggaagttcccaacaaggcctacggtgaccatggcgtgctggtatttggcgactgcgcggtaaatatcgcccctaccgcagagcaactggccgccatagccatcagctccgcacagagcgcaaaggcgctttgcggaatggagccccgcgtagccatgctttccttctccaccaagggcagcgccaagcacgagaacgtggatcgcgtagcggaagctaccaggctggtacacgagctcgctcccgagcttaacgcggacggcgaacttcaggcggatgctgctctggtcgaaaaagtcggccagctcaagagccccggaagccctgttgccggcaaggccaatgtactgatcttccccgacctgcaggcgggcaacatcggctataagctggttcagcgtctggcaggcgcagaggccataggccccatctgccagggcttcgcaaagcccatcaacgacctgtcccgcggctgcagcgttgacgatatagtatccgtcgttgccattaccgccgttcaggcacagaatatgtaa

SEQ ID NO: 99 - DNA, 1341 bp, Unknown
  Unknown gut bacteria
atggaagaagaaaaagacatcttaactgaagaaaataacgattcggaaatacccgtggaagccgaaatgatagatcaggcggttgaagaggcggcggagcacgccggcgggggggacgacggctttttcggcaagtacatatgggatgaggaaacgggcaggctgtacgagataaccgaggatccaaaaaagaagtgggacaggctgctcccgctgctgctgattgcgctgccagtaacagcccttgcgtttggcatcgccaagggttcctcgcttctgccgccggaatgctacaacggcacctccatactgtccgaaagcaatgtgggagaacagcttgcccagcctaaagcttacggagtaagcgacgctgaagaggcaacggccgagaacagccccgacacagagcaggccatggcgccggaacagtatacgccctgcgccatagtcatagacggcaggacaagggcggtgctggccagcaccgaggccgcggaatcgctgctggaggaagtcaggagctacttcgacggcaaggtgacggaatccggcgaccgtaccaccgagctttacagtggggtagagatgcagccccagcccgatgcaaagcccgaagacatttccagctacgaccgggtatacgaaaagttcacctcctcaagcagtcctctgaaggtcattaccactgtgacgagcagcgaaacgaaggagctgcccttcgactcaaaggtagagaaagaccccacactggtggccgacaccggcattaccctcaccttaggcagggcgggcagcagaaccaccgtgaaccatacggtatacataaacggcgaaaagagctccagccgcagcaagagcgaaacagttacggtggaaccccaggatacggtaatacttcagggcaccgataaaaagagcggcggcgagccgggcaggcacgagggcaaagagggcagaaagcccgaggcgctcagctttgcttcccccgtagcggagggagagataatttcaaactacggacagcgcgacggcatacttcatcttggcctggactacgaggccaaggccggagacccggtgctgtccagcgagggaggcaccgtggtctgcgccataaatcggggcggctacggcaacatcatagagatagaccacggcgaagggttcgtcacccgctacgcccacctgagccggttctccgtggctcccggcgataaggtagccaagggccagatcataggcaaggccggcgactcaggcagctgtaccgaagcacatcttcactttgagctgaggattgacggcatagcctacaatccaagatattacttagaaaagtaa

SEQ ID NO: 100 - DNA, 1128 bp, Unknown
  Unknown gut bacteria
atgcaagataaattcgacttcaaatacgagcttctgcacgtttgcaagcagtccggcgcccgccgcggcaggctgcacaccccgcacggagtaatagagaccccctgctatatgccggtaggcacacaggccacggtaaaggccatgcttccacgggacgtcaaggaagtgggctctatgataatactgtcaaacacatatcacctctttgagaggcccggtcacgagcttataaaagaggcgggcggcctgcacgagttcatgcggtgggataagcccatacttaccgacagcggcggctttcaggtgttcagcctcgcctccgccaataaaataaaagaggacggcgtggagttccgctcccttctggacggacgtaagcatttcttcacccccgagcttgtaatggagatagaggaagcccttggcgcggatatcgccatggcgttcgacgaatgcgccccttatccctccgaccgggaatacaccatagctgcaatggagcgcacccatcgctgggtcgtgcgctgcaaggctgcccatacccgcccggatcaggctcttttcggcatagttcagggcggcatgttcgccgacctcaggatagagagcgctaagtttctcgcttccctcgacctgccgggctatggcatcggcggtctttcagtgggcgagcccaaggaaatgatgtacgatatgctggagcagatgatgccctatatgcccgcaaacaagccccgctaccttatgggcgtgggcagccccgactgtctggtggagggcgctgtacgcggcatagacatgttcgactgcgtactccagacccgtatagcgagaaacggccttgcgctcacgggaagcggcaaaaaaatgctgcgaaacgcctcctttgagcacgacttcacgcctatcgaggagggctgcgactgctatgcctgcaagaacggcttcaccagggcatatatacgccaccttgtaaaatgcaaggagatactggcggcacagctcataaccacccacaacctgcgcttctctctgaggctcatggagcaggtgcgcaaggccatagagcaggacaggctgctggacttccgggaagagcttaaagcgaaaggaacattcgattga

SEQ ID NO: 101 - DNA, 2223 bp, Unknown
  Unknown gut bacteria
atgagtttaaaactgaaacgtgtactggccgtactggtgctgatcgcgctggtattcggctggtatgtcaccttgttcggcatcggtgacaaaacaaaggacgatgccatcacttcggtaaaatctgctttaaaatacggcctggacattgacggcggcgtctatgtcgttatggaggctaagacagacttgaccggagacgaactcaagaagctgatggaacagacccgcgcggtacttgacaatcgtgtcaatcaaatgggtgtcgcggaatcttccgtcactatcgagggcaacaagcgtctgagagttgagattccgggcatggaggatgcggaagacgccatcaaggcgatcggtaaaaccgcacagttatacttcattctggcagacggcagcgtggtactggacggcagccatgtcaaagacgcgcagattgcgacagatggaagctactacaaaattctgctcgactttgacagcgaaggcgcgaccttgttcgaagaaggaacccgcaaggcgtttaaccgtgaagtaacgtcaaccatcgaaggtgtggagagcaatcaaatcgcgatcgtactggataacgaaatcgtggtacatccgaatgtaaacagcgtcatcagcggcggaagctgtgaaatgacaggaaactatacaaaggaagacgcttccatgaccgcggcgctgattcgaggcggcgcgcttccggtagaactggaagaagtacagtcctccgtacagacggcgaccatcggcgcacacgcgctggacaagtccatcgtggcaggcgcgatcggtctggggattgtattcctgttgatgctgatcttttacggcatgctggggttggtcgcggatatcgcgctcctgctctatgttgtgatgttcctgtggtcgatggtcggtctgggtgtcgttatgaccctgccgggtatcgcggctctgatcctgtccatcggtatggcagttgacgcgaacgtcatcatttttgcgagaatcaaagaagaaatctgcgccggcaaaacgatccgcgtcgcggtggatgccggctttaagaacgcgctgacaacggtactcgacgcgcagattacaactctgatcgcggcagtggtactttatgaaatcggtacgacctccgtcaaaggtttcgcgctgaccttgatgatcggtattgtcatcagtatttttacagcggttgttatcacgcagctgtttatttccctgcttgccaataatccgaaattcgcgaagaacaagtactttggcgtcaacgatgatctgaccccgaagcagatgttaaataaaactttctcatttatcaagcatagaaaagtttactacatcatcagctgcgcgatcatcatcgcgggcctgctgttcgcgacgatcggcggtatgaattacggtatcgactttaccggcggcacgaccattcaggttgaaatgggcaaggaggttccgattgaggacgtcgaaaaatctctcgaagcctatgaattgaacccgcagattatttatgcgggagaaggcaatacacagattgtcatcaaaacgattaaatctttggacaacgcagcgcgtggagaaatcatcgacacgctgggtacggacttcggcatcacccaggaggatgtactggcttccgagcagttcggcccgtccgtcggaaacgagctgaagatgaacgcgttgaaggcagtaatcattgcttcaatcggcatgctgatctatattatcttccgcttcaagtcctggaaatacggcgtgacggcgattgccggcgttgtgcatgacgtactggtggttatcgctttctacgcgattttcggctatacggtcaacaatccgttcatcgcggcgatcttgactttggtcggatattccatcaacgatacgattgtaatctttgaccgtatcagagaaaacaaagccctgcatccaaaggacaacaacgagaccaatatcgacctgagtatcaatcagacgctgaatcgaaccatcatgacctcgctgactacgctggtggttatgatcccgctttgcatcatggtttcctccgcgatcagagaattcatcattccgctgatggtcggcgttatcgtaggatgctattcctccatctttgtttgcagcccgctttactacgatctctgcaagaaggatgaaacctccaagtatgtattaaatacatccaaaaaggcaaaaaagacaaaatag

SEQ ID NO: 102 - DNA, 1467 bp, Unknown
  Unknown gut bacteria
atgaatatagtctttttaccggatcatacagtaccggcgctggtcggaatctacacgatcaatattttgatgattatcgctgtcatttttgcggagcgcaaaagcccatcggcaacgctcgcgtggatcatggtgctggcctttgtcccaattatcggcttcgttttttatctggtttttaatcagaatatcgccagaattaaaatcaatcggctgacggaaaacgaaaaatacgtggtgagtcacgcgttaaaaaaacagatgcaggaaatggacaatccgcgctacgcgtttcattgtccgacgaccaggaactggcggcatctgatcaagctgaatcaggtctacggacacgctttttacagcgagaacaatcaggtggagctgattacggacggaatgacgctttttgacaggatgatgcgagatattcagggagcgaaggacaccatcaatatggaatacttcatcatcaaaaaggattttgtcgggatgtcgctgatcgaacttttgacacaaaaggcgaaggaaggcgtgacggtacgcctgcttttggacagcatgggctgccgaaccatcaatgaacatgtactcaaggactatctggcggcaggcggcaaggtcggcttttttttcaaaccgaaattcaagatcttcggtctgaagctgaactaccgcaatcaccgcaaaattgtcgtcattgaccacaaaatcgcttatacgggcggctacaatatcgcgaaggagtacatcggacaaaagaaaaaattcagttattggcgtgacacccatgtcaggattaccggcgacgcggtggcggatctcaacggccggtttattttagattggcggttcaccaccaaggaacagctgcagcttgaggcggcacgtatggcagagggggagacaccgggacatatcggcgtgcagatcgtttcttgcggaccggaatctccatctgaggaggtaaaacgtgccatgatgcgtatgattaccttcgccgagaagcgtgtttacttacagactccgtatttcgtaccggatccgagcattgtcgaatccctaaaaatggcggtgcagtcgggggtcgatgtcagaattatgattccgcacatgcctgatcacgtttttgtctactgggcgacgtattcttatgtcggagagctgcttcgatcaggcgccagagcctatatctatgacgacggcttcttgcatgccaagacactggtcgtggacggagaagtcggcaccatcggctcgaccaactttgacaaccgtagttttcgtttgaattttgaaaccaacgcgttcatttttgataaggacttcgcgcagcagatggagcgcgcctttatccacgatatggcacatcacggacatgaattgacctacgcggattatctgaagcgaggaaaactcatcaaatttaaggaagcaatctcaagactcttatcggatatattatga

SEQ ID NO: 103 - DNA, 2064 bp, Unknown
  Unknown gut bacteria
gacaaatacgaaccgagaagaagaggctgggtatggagagagaaagctgacaatcagcacatgggaccgtttgagtaccgtgagatttccaagccgttgaagcagagcgttccgctgcctcctgcaaaattcatggaagatattgacccacagccgatgcagaccatcactacagagatcgcttccggaagattcgaggacgatatccgcagaatgagaatgggcgcttggcacggcgctgaccatctgatggttatccgtcacatgggtcagtctcacatcgacggcctgatggaaggtacaccgcagggtatcggcggtgttccgatcaccagaaagcagatcagagcacagagaaaagccatcgacatgatcgaggatgaagttggtcgtccgatcaactaccactcctatgtatccggcgttgccggtccggacgttgctgtactgttcgcggaagaaggcgtaaacggcgcgcaccaggacccacagtacaacgttctttacagagatatcaactgcgtcagatcctttgtagatgcttgtgaatccaaaaaaatcatggcttgggcagacatgctgcagattgacggtgcgcacaatgcgaacgcgaccgcaagagaagcatggaaggtacagccggaactgatcgtacagcatgccatcaactccagattctccgagaaggtaggcatcaagccggaactgatctccttatcgaccgtaccgccgacagcgacaccggcgccttgtatgtatatggacctgccttacgcggtagcactcagagaaatctgcaacagatataagatgagagcgcagatgaacaccaagtatatccagtcctccgctcgtgaagcgacggttacgcacgttatgaacatgttcatctccaagctgaccagcgcggatattcagtccacgattacaccggacgaaggcagaaacgtgccttggcacatctacaacatggaagcctgcgacaccgcgaaacagactctgatcggcttagacggcatcatggatatggtagagctcaaaaaggacggtccgctgagagatatggccagagacctgaaagaaagagcttgcttgttcatggaagaaatcgtagagaacggcggctacttccaggcagttcaggatggcttcttcgttgactccgcgaaatatccggaaagaaacggcgacggcatcgcgcgtaagatcgagggcggcgtaggctatggctttatctttgagagagatgaagattacatggcgccggtaaccgcgcactatggctataacaacgtagaacagtacggcggagaccctgagaacccatccgcgctgatcggcggctgtacgtttgaagacagaagcaagatcgtttacattgacgagcttgatgaagaggataacgtaaacgtaagactcgcgaaggtcgcgaaatacagaaccggcgaagttatcacaccggaagtggaatggtgcggcgacagagtggttatggttaccatgatgcttccgaccaacaagcgtgttgcagaagcagcagcagttgaattaggtaagaaattaggtctggtggatccggaagttatctctgcggaagtgatgcaggatgcggaaggtaccagaatcgaattgaagggcagagtggacttcgatatcgacttgacaactcttgaaattccaccggagccacattatctgacagacaaagagctttatgatgaattcgaaggacacgaacacatgaaggttgtctgcggtacagtcggtgaagacgaacactccgtaggtatgagagaaatcatcaacatcaagcacggcggaatcgaaaaatggggtatcgaatgcgtatacctcggcacttccgtaccggtagaaaagatggttgacgcttgtatcgaagaaaatgcacaggcgatcctcgcttccacaatcatttcccacgacaatgttcactacaagaacatgaagagactgcacgaactctgcgtggaaaaaggtatcagagacaaggttatcatctgcgcgggcggcacacaggttattccggaagaagccgtcaagacc

SEQ ID NO: 104 - DNA, 2655 bp, Unknown
  Unknown gut bacteria
atgaaacaactgatcgcggacgcgctgagctgggaggagctcggtgagatacataaaacagaatatcaatttgaacttggcaagggcgtgctgcataaggaggcaggcagactgaccctgccgattcactgcaattttgtgatgccgttcgcggactgcgaaaaggtcaaagcggtgattttacacaagctcgacatgctcaaggaggtcgaactggatttttcgtaccgcgattttgtgatgccgaaggaggacgctgccagactctatgtcccgcatatggttcggattctcaacggttcgtatctggcgatcaccaagaccatcgtcgaaaaccgcgtcatggtcagagacggatgcctttactgtccggttctcggtaaagtcgcggcagagcagctgaatgagagagtggcgcaaaaattccgagaaatactcaaagaaactttcgattttgatatggagatcatctttgagaacgatgaagaactgctggcggaaactctgcgttctttccatgagagtgaggcgaaggatattgagcgctccatgcgggagtaccgggaagtgctcaagacgcgggcgaaggaaagaccgcaggcggcggacagcgtcacaggcggcggcttcggcggcggaaacaacggcggcggctttggcggaagcgcggcaggtgccggcagtaagaagcagggcggctggaaacgcagggaaaaggaactgcccgcggagggcaaccgcatcatgggacgcggcattccgggcggtaagaccgcggagctgcgagagatcgcaccggagatgggggtcgttatcctggaaggtgtgctgttccgcaagacggagcgtgtcatcaagagcggcaattatctcgtttccctgttgattaccgataataagacgacgatctgtgccaaggcgtttgtcagtgagaacaaatggaaggaaatcgatgaactgctcaaaccgggcgatggtgtcaagctgcgcggtgaggtgcagtgggacacctttgaaaacatgaatacggtcatgtatacggacctcgaaaagaccgaccgcgaaatcggccgcgaggacacctgggagaacggccggcgtgtggagcttcatattcactccaagatgagccagatggacggcttcaacgaagccaaagacatcgtggcgatggcagctaagtgggggcagcccgcggtcgcggtgaccgatcatggcgtggtgcaggcgttcccggactgcgcggcggaggccaaaaagcaaggcgaaaaaggccgcgagatcaaggtcatttacgggctggagggctatgtgttcgacgacgcggactgcgtgcaggaggacggcagcattgattacaagagcaaaccgacccatcacatcatcattctggcaaagacgcaggagggactgaagaacatttacaagctggtttcctattcccacctggattactattacaaaaaaccgcgcttgccgtggtcggtcatcgaagcgaaccgcgaaggactgatcatcggctcagcatgcagcgcaggcgaagtgttttcttcgatggtcaaacacgtgacctatcagaagcggacgcgtaccgaaaagatcatggagcagaaatccgcggaggagcaggcgcgtatcgcctcccgctatgactatctggaaatccagcctgtcatcaacaaccgcttcatgttcgatgaggagttttatctggacggcaggcgcattgagaatgaggacgatatccgcgagatcaaccggcggatcgtggcgctggcggacaagctcggcaagcgggtcgtggcaacgacggattcacactatacggagccggatgatgcaatctaccgcaatatcgtgatggcgggcatgggcttcgaagacgcagagagcggcgagggtctgtatatgaaaacgaccgatgagatgatggaagagttttcgtatctgggcgcgcgcgcccaggagatcgtcgtggacaatacgaattacatcgcgagtttgatcgacggtgatatccgtccggtacccgcgggcaagttcccgccgaagatcgagggcgcgaaggaaaccctgcgcaagacctgtatggaacgcgcacacgcgcagtacggagacccactgccgaaggaaatcgaggatcggctggatatcgagctgaattcgatcatcaacaacggctacgcggtcatgtacgtcagcgcgcagatgctggtaaacaagtcgctggaggacgggtatctggtcggctcgcgtggttcagtcggctcatcgttcgcagcgacgatggcgggcattacggaagtcaatccgcttgacccgcattatctttgtccgaactgcaaaaagattatctggggtgatatgcagaagcacgactgcggcgtagctatgccgccgctggactgtccggactgcggcacgccgatgaaacgggacggctatacgatcccgttcgcgaccttccttgggtttaagggcaataaggagccggatatcgacttgaacttcgccggggaatatcagccggtggctcaccgctatgtcgggactattttcggtgaaaagaatgtgtttaaggcgggaacggtcggtacggtcgcagaaaaaaccgcttatggttatgtcgcgaagttctttgaggagcgcgatatt

SEQ ID NO: 105 - DNA, 2073 bp, Unknown
  Unknown gut bacteria
atgagaagcagaatttacagcaagctggcatggaccaatatctgcaagaaccgcaagacttatctgccgtacatggtcagcgccatcggcatggtgatgatgttttttcttacgatcaatctgtccatggatccgcaggtggcgacctttgaggaaggaaactggatgcagcttatcctgagacttggctcaattgtgatcggcctgttctcggtaatcttcctgttctatacgaacagcttcctgatgaagcgccgtaagaccgagctgggactgtatcatgtgctgggcatgggcaaaacccacatcgcgagtgtgctgctctgggaaactctctttacggctctgctcagcatcggtgccggcgcgatcggcggcatggtgttcagcaaggcggcacaggtgctgctgctgcggatgatgggaaggagtatcgattatgtgttcaccctgcagccgtcggcgctcgtatacagcgtgattctgtttgcggcaattttcgcgctcatctacgtcaagagcgtgatcgagatcagcaggcaaagtaccgtcgatctgctttacagcaaggcgcagggtgaaaaagagccgcgggcaaatttcgtgctggctttcatcggcatcttgtctttgggggcagggtacgtattggcgatgaccgtacaaaacccgacagacgcgattctggtattcttcatcgctgtcatcgctgtcatcatcggcacctactgtactttcatcgcgggcagcgtggcattgctcaaactgctgcgcaaaaataagaactattactatcagaccggtcatttcattgcgacctcgtcgatgatcttccggatgaaaaagcatggggcggggcttgcgagcatctgcatcctttcgaccatggtgctggtgatgatctcatcgacggcctgtctgtactttggcgccggcaacgcgatcaacgcagcctatccgcgcgatctggaggcgacaatcggcatgagggaaaccaatgacgcgacctttgcggcagcaggcgcagatctggatcgtctgcttgctgcgtcgcttcaaaaacagggactgaaggcaaagaacgagatccgctatacgctttgtgccttttacgggcaaatagaggacggcgtattgacgccgcttgcggaatatacagcggacggttatacctgcaaggtcatgaccgcggaggaatacaacgagaattttggaacccatgtaagcttggaacgcagtcagctgctctacaagaaaaatgagggaagcttgcgggaaaccatgctgacgattgccgacaaacgttacgctgtcattggagaagcgaaaaaaatgattctgcgtggtaccgacgcagtagatatggcaaacgccatttatctggttgtttctgaccggagtgaattcgatcgtgtggtgcaggctttgaggcaaagcgccgcagcggaaagctttcgtcttgtcaactgtcgggcgttgaatctgacagaggcaaacggcagtgcggcgtccgaaacgcggattttggcagcggaagaggagctgcaaagagaagttttaaagatgcaggataaaccagacaccgcaatcggctcccacaagggcaatcagccggtctacgcttcgatggatatgaacttccgcaccaaaggcagcgcgatggaaactttcacgaatctgtacggcggtctgtttttcctggggattcttttgagccttgcgtttctgggcgcaacggtcatgatcatgtactataagcagatcaccgagggctacgacgataaggaacgcttccacgtcctgcgtgacgtggggatgagcgaccgcgagatccgaaaatcgattcgggatcaggttctcaaggtctttttcatcccactgcttggtgccgggctgcatattgcttttgcgttccacatcatcaaattgatgatcaaggtattcggcatcagcaacacaacactgctgatctacaccacgctggcgtccttcctgctgttcgccgctttctacattgtggtatacctgatcacctccagagcgtattacaaaattgtcgcagtggagcagtag

SEQ ID NO: 106 - DNA, 1260 bp, Unknown
  Unknown gut bacteria
gtcaatctcgcgctggaagtcatcgaaaagtacggaaatcttaagcagccgctgttcgcgacacgcaggaaggtttccatgcagggcctgcggtgtctgatggcggattccggaaacacgattcgcgaacaggtggaagatattctgaacctgaatcatcggattaacgcgatctgcgagcgcagaaataagctggaacaggacgaaacttctctcaaagcctgggaggcctacgaccttccgctggagctggccggcaccaaaaagaccttggcgcagaccggtgtgctcccaatgggcacagataccgacgcgctggcaggcgcgctggcgggacaggcggaaacggacggcacagtattcaaaatcgttcatatagacaaggatatgtactacgcggcgattctgatgctgaccgagcaggcagccgatgtgcagacaattttaaagcaatacggtttttcacaggtgaccttcggcacgatgaagggcacagcaagcgagaaccttatacggattcaaggggaaaaagatgtattaagggaagagtatgaaaaggcagcgaaggaggctgccgcaaaatccgcgcgcaaagcagatatcgaggcttatgccgatatgctgaccatcgcggcggataaggaaaaaatgaaaacaaaactgctgaaaaccaaacgaaccttcttcctggaaggatggattccacaaaagtgcgcaaaaaaagcagcggagcttttggacgactacgaatgctattacgcgttccgcgagccggaagcagaggaagaagtccctgtactcttggaaaacaggagctttttcagacctacggaggcgattaccgagatgtattcgctgccgagctattggggctttgacccgacctccatctacgcgctgttctatatcgtatttttcggtatgatgttcagtgacgcgggatacgggctgctgatggcaatcgggtgcttcatcattctcaaaaaattcgatctcgaaggcacaacatggaagatggtgaagctgttcttctactgcgggatctccaccttcgtgtggggtgcgctgttcggcggatggttcggcgatgtggtgacggtgttctcaaccaccttcctcggcaaggccgcggagctgaaaccgctttggttcaatccgcttgacgacccgatgaagcttttgatcctgtcgctgatcctaggtgtgatccacctgtttatcggcatggggatccaggcctatatggagataaaggatggc

SEQ ID NO: 107 - DNA, 897 bp, Unknown
  Unknown gut bacteria
atgaaagaaaagacaagctacgcaaagcagagagtcaagcgaatgatcatcctcggcatctatcagtttcaggacccctattaccagggtgtggcggcacagctggcctttttcctgttcctctctattttgcctactctgattcttttgtcccaggttctgggtctgttctcattgtcactggaggaactgcagacttgggccaatatcaatatcagcggagagggtgttgatttgatcgacgatatgctcagctactcaccatccggtgcgaacagcgtgtttctcgcggttaccgcggtgtgggcagcctcgcgcgtgcagttcgcgttgattcgcgtgaccaactacacgctgaccgacggagcttccacaggggaaggctatgttcgagatcgcattcgctccatcaagaccattttgataacagtttttacgatcgcgttttctctggtggtgctggtatatggaccgatcctgttaaagctggtattcggcaaggttttggggacagatctcgcgaacgcggcatgggttgcttttcgctggccggttacgatgggactgtattttttgatgatttcgtacaactattacgtgctgccgacagaaagagtgccgtaccgggacattgtaccgggcagtatcttcgcttccatcggttttttggtcgtgacgattgtctataatatctacacaaaatacagcgtgaattatgatattctttacggatccttttcgaatatcgtcgtgctgctgatgtggttttggtttatttcgtgggtgatgtgcctgggaatcacgaccaatcgtgtctggtgggccacgcgaagaaaaaatccgattccgattgcggtcaaaaagcggccgcgcaggaaaccgatcaatattatttag

SEQ ID NO: 108 - DNA, 975 bp, Unknown
  Unknown gut bacteria
catatcgatagaaatctggcatttgaaatcgagaatgccggtgtagaatatatttacgtatacagcacggataaggaaaaggaagggcaggtaaccaaggttatcggcaatcgctttgtcgatctgcagcaatacgtcaattttgacgtgtcggaactgaaggtcgcggacaaggtcttttatccggttctcaaggaaatcctcgcggaggcagcctctgaggacgaattaaaagaaaaacttacggcgagaaagaacgacctttctccgaaacacattatcatagaagatatcatcgcttccatcagctatattctcaacttgaattacggcatcggaaccgtagacgatatcgaccatctgggcaaccgcagactgagaacagtcggagaacttctccaaaaccagttccgtatcggtctcgccagaatggaacgtgtcgtcaaggaaagaatgaccacgcaggatatcgaggtgaccacaccgcaggcgctgatgaacatcagaccggtaaccgcggcaatcaaggagttcttcggaagctcacagctttcgcagttcatggaccagaacaatccgctggccgagctgacgcacaagagaagactttcggcactcggaccgggcggactttcgagagaaagagccggcttcgaggtgcgtgacgtgcaccattcccactacggcagaatgtgtccgatcgagacgccggaaggtccgaacatcggtctgatcggctcgctgaccacttatggcgtcatcaaccagtacggcttcatcgaaacgccatacagagtggtagataaagaaacacacagagtcaccgacgagattcactatctgacggcagacgaagaagaaatgatggtcgtcgcgcaagcgaacgaaccgctgaccgaagacggacactttgtcaacgcgaaggtcgcgtccagaggcgaacatggagaaatcgcactgatgccgagagaaaaa

SEQ ID NO: 109 - DNA, 2001 bp, Unknown
  Unknown gut bacteria
acggtttctctgaccggattgggactggattttcgcccgatggctgtacgtgctctgggcgcgctgctgaactatctttttgaaacacaaaaacaaaatctcaaacatctgacgcacatcaggcattatgaaatcggcacgcgcatggcgctggacaaggcgacggtgcgcaatctggaaatcaccgagacgctgtacgaaaaaaaagtacaagggtcgcttttgggtgtcctcgacaagacgcgtaccgccatgggcagccgcaaaatgcgccaatggctgcgcgaaccgctcaatgacgcagcggagatcaacgagcggctcaatggtgtggaggaactgtatcatgatctgctcacacgcagcaatatcagagaaaatctgcgacacgtctacgattttgaacgtctgatcggacgcattgcatgtgggaacgccaacggcagagacatgatcgcgctgcgtaattccatcgcggtgctgccggagctcaagagtgatctcgacctcatgcaaagcgcggcacttcgaaaactttgtgacatgattgactgtctgacggatgtttatgacgtgatcgaccgcgcgatctgtgaagacccgccgtttaccatcaaagaaggcgggctgatcaaggagggcttttcggaggaactggatcatctgaacttttcgattcaagacggaaaggagtggatttccaatctcgaaaacaccgagcgcgagcgcaccggcatcaagaacctgaaggtcggctacaatcgggtgtttggctattatttggaagttaccaaatcctattttgatttgattcccgaaaactacattcgcaaacaaacgctggccaacgcggaacgcttcattacgccggagctgaaggagatggaaaatctggttctgaatgcgcagaccaagatcaatcaactggaatacgagctttttgtcggtgtgagagaggaaatccagcgctatatggaaaccattcaacagacctccgcggcggtcgcggagctggatgttctgtctgccttcgcgcaggtcagtgaaaagcttggctatgtgaaaccggtggtggatacttcgatggaactggagattgtcaagggcagacatccggtcattgagcagatggtcagtgacggtttgtttgtgtccaacgacacctatttgaatgatcgtgacgcgagcctgcttttgatcacaggaccgaatatggcaggtaagtccacctatatgcggcagaccgcgctgatcgtgctgatggcgcaggcgggctgcttcgtgccatgcgcgcaggcgcatatcggggtgtgtgaccgcatctttacgcgcatcggcgcctcggacaatctggcacaggggcagtccaccttctttgtggagatgagcgagctgtcctatattctcaacaacgccagggcgcgcagtctgatcattttggatgagatcgggcgcggcaccagcacctatgatggtctgtcgattgcctgggctgcctgtgagtatctctgcaatgatcacacccatatccggactttgttcgcgacgcattatcacgaactgacggtgctggaaggtcagcttccgggtgtacgcaacctgaatgtcgatgtcacagaagtcggcggcaatatcgtcttcctgcacaagatcgtggagggctccgcgaatcgcagctacgggatccatgtggcaaagctggcgggaatcccgaagattttgcttgaaaacgcgcaggaaaagctcgctgagctggagggcagcaccacgagcgccgcagggaccgcacgcgtaagccgcagcgccgatccatcgggaacggaaggacgcgaggacagagcaaaaacgcctgcctgtgaggaggaaagccagctttcaatgttttccttcgcgccgaacccggtgattgaaaaattacgcgcgctgaatttgatggaaattacgccgtccaaggcgtttgcgattttggaggagctcaaggcttctctgggaaaagaataa

SEQ ID NO: 110 - DNA, 951 bp, Unknown
  Unknown gut bacteria
ttcttcgcggcggtgctgttcttcgcgctgcgcccgaacaacattatgaactccatcggcaaatatctcaatccgatatttttaatttgtctgggtatattggttgtcgcggcgctgcttgacccgatccagagcgtaggttctgtagcggcaagcggagcttacgcggataacgcgttctccacaggcttcctgcagggctatgacaccttagacgcgctggcttctttggcattcggcattatcgttgtcaacgtgatcaaagagatgggtgtcgaggaaccgggtgcgatcgcgaaaaatacgattaaatccggcgttttcagcatggtgctgatgacggtcatctacgctctgatcgcgattgtcggcgcgcagagctacggtttgtacgcggatcagctgggagaaccctcctttaacggcggcaacgccttcgcgattgtcgcgcagcattacctcggcaaggcgggcatgatcgtgctggcgctgactgttaccttctgctgtatgaaaactgccatcgggctggttacagcctgcgcggataccttcagcgtgatgtttccgcgctccctgagttatcgcagctgggccatcgtgtttaccgcgttttcgcttctggtatccaacatcggcttgtcgaagattatttccttctcggcaccggtgctgtatttcctgtatccactggcaatcatgctgatcctgctcaatatttttggtaagtactttgactacgcgcgtccggtattcacttgggccattggctttacgatgatcgcggcggtctttgatctgctcaaggtcgcgggtctcgcgcagggtgttgtggactgggtcagcacatggctgccgttctattcgctgggtctgggctggatcgtgccgggtgctgtcggtacgatgatcggacttataatcgccaagcccggcaagaaaacagcgtaa

SEQ ID NO: 111 - DNA, 1116 bp, Unknown
  Unknown gut bacteria
atgatcacaaaagctgaatttttagaaaaaatcctaaatatcaatcctaaatacaacaccgagctgatcggcaaagcattcgatacagcccagcgtctgcacgagggacaactgcgcaagagcggagaaccgtattttattcatccgatcaatgtcgcgctgatcctcgcggagatgggtatggacgacgcgacgatcgtcggtgggcttttgcatgacgtggtagaagatacaccttacaccagagagcagctcgtcgccgacttcggggaggaaatcgctcttctggtggacggtgttacgaaattaggcacgattaaatttgaatccaaagaggaaatacaagcggagaacttccgcaagatgtttttggcgatgtccaaggacatccgcgtcctgatcatcaagctggcggacagactgcacaacatgcggaccatggagtacatgagccccgagaaaaaaatcgaaaagtgcaacgaaactctcgaaatttacgcgccgcttgccagcaggctcggtatttccaaagtcaagtttgagcttgaggatctggcactcaaatatctgcacccgcaggagttccaggacctcaaagaaaaggtcaataagcgtaaggaagagcgcgaagcgaccatcaatctggtcatcagcgagattcgagacgcgctgaacgatatgcatctgcattatgatatttacggcagagcgaaacattattacagcatctacaaaaagatgaaatatcaaaacaagcagatcgatgaaatcttcgatttgatcgcggtacgcatcatcgtcgataatgtcaaggactgctacgcggtactcggtatcgtgcataccatgtggaaaccgattccgggcagatttaaggactatatcgcgatgccgaaaccgaatatgtaccaatccctgcacaccacagttatcgctgacaacggggagccgtttgaaatccagatccgcacctatgagatgcatcaggtcgcggaatatggtatcgcggcacattggaaatacaaggagggagacaccaccggcaaagcttccaatgatgacatgaagctggcatggctcagacaatctttggagtggcagcaggatatcaatgat

SEQ ID NO: 112 - DNA, 1608 bp, Unknown
  Unknown gut bacteria
caggtatcggtaccggaaggcatgaccatcatggaggcagccgagaaggttggcgtacatatcccgcacctctgttatttgaaggacattaacgagattggcgcctgtcgtgtctgccttgtggaattaaaaggaatggaaaagctcgtgaccgcgtgcaacaccatctgcgaagacggtatggaaatcctgacgaacagtccgcgtgtcagaagaaccagaaggatcaatgtggaactgatgctttcggaccacaacgcgaactgcgcgagctgcatcaagagcggaaactgcacgctgcagacgattgccaatgaccttggcatcatcctttccgattatgaaaatacggcagaaaaaggccgctgggataggaatcttccgctggtgcgtgatgcttccaaatgtgtgaaatgcatgcgctgcattcaggtctgcgaaaaaattcaaggcatgggcatctggacgctgatcggttccggctaccggacgaccatcgggctcaaagataatcagtccttccgcgaaagcgactgcgcgctttgcgggcagtgcatcacgcattgtccggtcggcgcgctgcgcgaaagagatgacagattggatctcaacgacgcgctcgcggatccggaaatcgtcaccatcgtacaggtggctccggcggtgcgtaccgcgtggggagagcagattggtctcaaggataaggacgcgaccatgggcaagctggtctgcgcgctcaaaaaaatcggtattgattatgtctttgataccaattacagtgcggatctgacgattatggaagaaggcagtgaattcctcgaaagactcgccaacaggaatcgtcataaatggccgatgtttacctcctgctgcccgggctggctgcgctttgtcagaacgcagtatccggatatggtagaggacttgtccaccgcgaaatcaccgcagcagatgttcggcgcgatttccaaaacctatatcgcgcaaaagcttggacttgacccaagtaagattctttcaatttctatcatgccttgcgtggcgaaaaagtttgagtgtgatgtcgagcaggtaaacagtgccggtcatggcaaggatgtcgatctggtactgacgaccagagaacttgaccgtctgattcgctgcgatagcatcaagccgcaggatttgatggatatgccgtttgatgatatctttggcgagggctccggcgcggctgtgatttttggtacgaccggcggcgtcatggaagcggcgctcagaagcgcctattatctggttaccggaagcaatccggatccggacgcgttcaaggaagtgcgcggtatggatggctggaaggaagcaaaatttgatctggccggcaccacgctgaaggtcgcggcggccagcggactcggcaatgcgaggaaactgatcgacgcagttaaccgcggagacgcagagtatgatttcgtcgaaatcatggcttgtccgggcggatgcgtgggcggcggcggtcagccgtttgtggacggcaaggaattcgcgccgaagcgcgcgcttaaactctacggtctggataaggtcaataacctcagattttcacacgagaatcaagcggtacag

SEQ ID NO: 113 - DNA, 2055 bp, Unknown
  Unknown gut bacteria
atggataaatttgaaagatttgataaatttgaaaagctggaccgaaaagtagaagaaaccattcgcgaagtggaaaccatggacagacggaagttctatcgcaacagttttgtctgcgccggcgtctgggcgctgctcttgaatctggtgattgaaacgctcggcaggtttccgacagtgggaatctttggcggactgtcctttatggtgcacagcccgctggtctttttatataacgccttgattctctacgcgaccttagtgctggcatcgttgttcaaacggagagtttttttctttaccattgtttcgattttctggctgggcatcggcatcatcaacggcgtgatcctgacacagcgcatgacgccgttcaccgtaaaggatctgagcaatctcaatgacggactgaccatcgtgaccaattacctcagcaagcttgaaatcgcgggtgcgattgcagcggtgctgatcgctgtcggcctgctggtgctgctttttatcaagggaccgcaaaaaagagacggcgtgaaacgcaagcgcaatctggtcgcggtgattttggtcatcgtcttcaccttcctgtcatcctcctttgtgattaagacaggcattgtgcagactttcttcggcaacctcgcctatgcttatcgagactacggtgtggtctactgttttgtcaatacctggctgaacaccggaatcagcaagccggacggatacagcagggaagaaattctttccatcttcgacaaaaaagaactcggtgatgacaacaccatgctgcttacccaaaaggatgaggacgagcagcatccgaacatcctgtttttgcagctggaatctttcatcgatccgatgacgattcagagcatcacactttcgcaggacccatgcccgaacttccgcaagctgatgcagacctattcctcgggcgagctgaccgtaccggcctgcggggcaggtaccgccaacgtggagtttgaagtgctgaccggactgtcagtaaagttcttcggcccgggcgaatatccgtacaagtcggtcttaaaagaaaaaaccggagaaagccttgcctacgacctcgacagtctcggctacacctcgcacgcgattcataatcacagggcagtcttttacaaccgcaacagcgttttttcgaacatgggctttgacaccttcacgagtgtggaatacatgaaaaatgtcgaaaagacgccgaagaactgggcgaaggactatgtgctgacggattgcattactgacgcgctgaattctacaaaggggcgcgatatgatctatacgatatcggtgcagggacacggcaagtatccaatccagcagatcatgcaaaatccggcgattgaggtcccctcggcgccgacggaggcgctgaagtggaaatatgaatactatgtcaatcaggtttacgagatggatcagtttatcaaggagctgacagatacgctcgccaagcgtgaggaaccgaccgtcctcgtgatgtacggcgatcatattcctgcgctggatatgaccgaggatgatctggaaagcggcaatctctacggcacgcagtatctgatctggaacaatataaatctgccgaaggacgacgaaaatctccacgcctatcagctcgcggcgcacgtgatggacatgctggatatgcgggtaggcacgatctttacctatcagcagaaccacaagaacagcgaaacctatctcgcggatttgaaggcgcttggctatgacatgctttacggcaaatactatatctacggcggcatgaatccgttcaagccgacgaatctgaagatgggcgtcaacaatatttctatcgaagaaatcgtcaaaatcggagacaaatattacatcaagggcaggaatttcacgcagtacagcaaggtcacgctgaacggcaaggagctcaagaccatatatctgggcgaaaacgtgctcggacttttggaggatgttgatccgaacgacgcggataagatgaaggtcagccagattgagaacaagagcggagaaattttgagtaccaccgaatag

SEQ ID NO: 114 - DNA, 1488 bp, Unknown
  Unknown gut bacteria
gagagcgtaacgatctgtatgccgaacgcgccgcaggcggtcatcatgttctatgccgtcaacaaggccggcgcgattgccaatatggtacatccgctgtccagtgaatccgaaattgaattctgcttgcgccagtcggccagtgtggtctgcctcacgctcgatcagttctacggcaagtttgctaatatccgcggcagggtgcagctgcgaagtctgattctgaccagcatcaaggacgcgctcagcccgatcaaacgcaagggttattatctggcggagggccgcaaggtgaagaaggttcccgtcaatgccgaaattgtctggtgggaaaaatttctgcgtgacggcgcggactatcacggtccatatcatgtggtgcgcgaggcgggcgatcctgcggcgatcctttacagcggcggcacgaccggaacgatgaaagggatcctgctttcaaatctgaatttcaacgcgctcggacagcagatcatcgcgacgaacccgatgttcaagccgggggacaagatgctggctgtcatgccgatcttccatggcttcggactgggcgtatgcatccactccatgctttcgcaaggggggcgctgcctgctcatcccgcgcttcaatccacagagctacgcgaagctgctcaaaaagcacaagccgaatttcatcgcgggtgtaccgacgctctacgaggcgctgctgcgtctcaaaacgctcaaacatgtggatctttcctgcttaaaaggcgttttcagcggcggagattctttgtcgattgagctaaaaaaacgtttcgacaaatttctcgcggagcacaacgcgacgattccggtcagagagggttatggcacgacggaatgcgtgaccgcgagctgtctgacaccgtcgcactgggcgaaagagggcagcatcggactgcctttcccggataccttctataagatcgtcaaacctggtactgaagaggaagtgccttacggcgaggaaggtgagatctgcctgaccggcccgacgatgatgatggaatacatcaacaatccggaggaaacggcgaacactctgcgcaggcatccggatgggctgaaatggctgcataccggagaccttggcatgatggacgcggacggtttcatctacttccgccaaaggatcaagcgcatgatcgtcaccagcggctataatgtctatccgtctcagatcgaaaacgtactcgacgcgcacgagctggtgcacatgagctgtgtgatcggtgtgccggatccatacaagatgcagagggtcgtggctttcatcgtgctgaaaccggacgtcaagattccggaggatgcggcgcgcgaaatcctgctcgcttattgtgggaagcatgtcgcgaaatacgcgatgccgaaggagctccacttccgcgacagtctgcccaagacgctggtcggcaaggtggcctatcgggttttggaagaggaagaagcaaagaattacgcgtaa

SEQ ID NO: 115 - DNA, 1884 bp, Unknown
  Unknown gut bacteria
atgaaaaaagatctgacacaatatcgtttccccgaagacctcaaaaacatgtccgacgaggaaatggagctgttatcttacgcgattcgcgagtttttaatcgagcatgtttccaaaaccggtggacatcttgcttccaacctcggtgtcgtggagctgacgatagctttgcataagatttttgacagtccgcgggacaaaatcatttgggatgtcgggcatcaatcctatgtccacaagattttgaccgggcgcgcggacgcgtttgataccctgcggcagttcggaggtctgagcggcttcccaaagggcaaggaaagcgcacacgacgcgtttgataccggacacagcagcacctcaatctcggcagcggcaggttacgctgcggcgcgggatattcagggcgaggattatgaagttgtcgcggtcatcggagacggttcgctgaccggaggcatggcttatgaggcgttaaacaatatcggagcttccaagtccaagctcatcgtgattctcaacgacaacggcatgtcgatttcgccgaatatcggtgggatttccaggcatttggggtcgctgcgcacctccaaaggttatctgagcgcaaagagcttcgtcaagaataagatcggcgcgattcccagtgtgggcaaaggcatcgcgcagggattggccgatatcaaaaatgacattaaatacacgattttggagcgcggcggcgtgctctttgaagaattgggatttacctatttcggaccggtggacggacatcatctgccggagcttttggatgtattgtcgaaggcaaaaaacctgaatgaaccggttctgatccacgtcatcacaaaaaaaggcaagggataccgcaacgcggaacaaaatccgggcaaatttcacgggatcggcagctttgaccccgaaacgggcaaagaggcggcgaaatccgagaaaccgacctattcaaaggtcatgggcgagtatctgacagagcttgcaaaaaaagatccgcgcgttgtggcaatcaccgcggcaatgggagaggcgacagggcttggaggatttgccgaaaagtttccggagcgcttttttgacgtcggcattgccgagcagcacgctgtgacatttgcggcagggcttgcaaaagccggtatgcggccgtttgtctgtatttattcttccttcctgcagcgggcctacgaccagatgctggaggacgtctgcatgcaggaacttccggtaacctttatgatcgcccgcgccggcatcgtaggcgcggacggtgagacgcatcacggcatcttcgatctcagctatcttgctacgatgccgcagctgacggtgctggcaccgacttccgacgagatgctccgcgcgagtatggatttcgcgatggaacaagtcggaccgtgcgcgatccgctatccgcgcggggaggttatgactgaagaagaaggcaggattccgagcctgatgtattacaaccggacaatggaatacgggaacacgctccttacggatcgtgtggagattctcggcgtcggcaaaatggccggcatcggacgggaagtttttgtccggctgttagaaaaaggcgtgcaggcacgttatcaggatgtgaatatcgtgaaaccgatcgaaacttccgtaaatgccatgaacacgctgcgcggcgatctgatcgtgaccatcgaagataatattgtatccggcggtttcggcgaaagcctgcgaggcgctttagagccgaagcatcgtcttttgaacttcggctggccggatcgctttatcggccaggggacgtttgacgaactgactgaaaaatacggcctgtctgcggcaaaaatcacagaaaggatttgtgaagaacttgaaagaaaggcttga

SEQ ID NO: 116 - DNA, 1578 bp, Unknown
  Unknown gut bacteria
atgaaggtaagcgttaaggattgtctacagctggaagctttccgcaagtgcattgtcgttgcaggagaaaagcacatggatcgccgggtaaaagcggtttcggtcatggacgcggcaacggcggaggaagcggtcaagtgcagcggcagcagcggcaatatggtgttgacttcgttcgcgggcatgaaacatgacgtgaaacagcagcaggaaacaattcgcgaactggcaaaggcaggtgtcgccgcgctggtggtttttcgcagggagcagaccacgcagcctgttgacaaggcagtgacgcgcgcagctgatgaggccggtctgccgttgatcatcatggtcgatggagaaaacatggactattcgcagatcatcgcggaggtcatggaacacgtgctttatggcaataattttaagaacagcctgatcaacaacacgatttttcatctgttgaattttgaaaagcacgcgaatttccagcaggcgctgcgtgaggcggcgatcaacaacgactttcaggtagtgcttttgagcgaggacttcaacccgatcttcgcgatcgaaacgcggcatcagaccacaatcaacgaggcgatccgccgcgggaaggaagcggcgctgaacctcagcaacatctacagtctgatcgagatcgacggggtgctgacctactggggtctggtacacatcaataacgacaaatactatctgttcattgtcgataacgacgacaattattcgtccggcgaaatgaccaagctggccgagatcatcgagctggcgatgggcatgtggaagtacacgccggagcgtgacgcgaaggcagagcttgtcaaggcgctgatgcgcggcaacaagagtctggcgtattcgatccgcgaggaagcaggcgtgaaattaaccgacattctttcggtcttttatgccaaaggtattgaggataaccatgcggaggaagtgattcatcggtttgtcagcgagggccttttggacatcatcaagatcagcgaggaaaacgaaagctacgcgctgctgctcaagggggcgaagctggctgatcaggaggaaaatgaggaaaaggctgtttgcctgagattcttcgacgcgctcaaggaaaacaagacggtccgcattttccatgtgaccggcatcgacggcatcgagggcgcaggagacggattccgtctgatcggcgaaacctgggcgtttgtaggaagcattttcccgtacaagcgggtgttcaccaaatatgaactgacactggtcagcaactgcatcaatattcaagtgcagggcggctatctgaaaaagaactatatggatcttttggagccgtttcgcaaggagggggacaacaagtccaggcagcttttggaaaccctggaaaccttcgtgttggacgcgggcatgaacagcggcaagacctctgagtttatgggcatccacacaaacacagtgcagtatcgcctgaagaagattaatgaaatcctcggcgcggagattaccggaaaccgcgtgattccgggattgacaatcgcgctcgcgctgcggagaatggaagcggcgtcgaaatag

SEQ ID NO: 117 - DNA, 1389 bp, Unknown
  Unknown gut bacteria
atgaggtatgaagatttaaagtatttggaggtaccattaccggaagcaatcgcgaaggaaaaatggggcggtttctttgagaatgcccgcagccgaatcgcggcatatctggatgacgaaacaacagattacgcgctgcgctgccgattggaaatggaacttggaatactgcaaaacctgcaggaaagatatactctgtgtccggaagaggctcttttgatcatgcaggaaaaaattccggttatgaccgcggaagaattggaaaaactgcgcatggaagataaagcagattggatttacataaacggacaggttcgttacttggacagctttgctgctacgctttgcaaggcttatccggaagtttggtcgcgaaccgaagccggtgatacgagcgattacacgctcatagaggattacattcatggctgcgaagacaatctcgaaagaaccgcgcatatacacatccgacatgaagtggaaatcgcgccgcgggcgctgcgtgaaggagaaacgattcgagtacatattccgattccgcgggaacgggccggcatcacgaattttaaaatgctgcggacttcgcatacgccttcgtttatttccgatagcaaggcggcacaaccgacaatctattttgaagaaatcgcggcgaaagggcaggtgttctccgtggagtatgagcttgattacacaactgcgtatcataagcttgaaacaaggtcggaggcggatatgccgcaggaggcgagcactgcttgtgaagaggctttttcgagtgaaaacctcatggaagaagcgccgcatattcgcttcactccgcatctcgtcacgctttgtgaaaaacttatcggaggcgaagtcaatccgcttcgcaaggccagagcaatctataattatgtgacaacgaaaatggactatcgttttgtgcgtgattacgcgagcattgaaaatctatcagaatactgtgccttgaatcgtaagggggattgcgggattcattctttgctgttcattacgctttgccgtatcgcgggaattccggcgcagtgggagtccggattagaagcctcaccgacttatgttggcgaacatgattgggcacgcttcttcattcaagatttggggtggctttacgcggaccctgccggaggagtgctggcttacgtgagaaaatcgtatgatcgctggaatttcttctttggaaatgtggacccgtatcgaattccgatcaatgatcggtttcagcatgatttttatcctaaaaagcagcattggcgcatagatccatatgacaatcaatgcggtgagatggaatatgaggacagcggcgtatatggagatgatcttatttaccgccatatcccgattgacatctatttgaaataa

SEQ ID NO: 118 - DNA, 2325 bp, Unknown
  Unknown gut bacteria
atggcagaaagaatggtcatgccctgcgtgccgctgcgtggattgtcggtgtttccgcacacaatcctgcattttgacattggcagggaaaaatccgtcaaagcactggaagccgctatgacggcagataaacagttatttctgacttctcaaaaggatgaaaacatcttgattccgacgccggaggattattacgaggtcggaacggttgtaaagatcaagcaaatgctcaaaatccaaggtgacgcagtgcgggtgctggtagaaggccagtatcgcgcggtgatgagcggcgtcgcgacggaggagccatatatcatggcagagcttacggaggcggaaattacgccggcagatccgcaggaggtagaagtgcaggcgatgatgcgctctgtactctatgccttcgatgaatacatggaattgaacccgtcgatcaaggatgaggtttatgagctgatcagctcgatcgaggagccggatatcttcgcggatacggtggcgatgcagctggacgttaaggttgctgccaagcaggaggtgctggaggccttcgacgtgaaacagcgtttgcaaatcgtcaaccgccagattttggaggagaatcagattcttgccatggagcgcgacatcagcgagcgtgtgcaggaagcggtgaaacagaatcagaaagaatatatcctgcgagagcagatgaaggtgattcaggacgaactcggctacggagaagaagccgcaagcgaggtggagcgctggagtgagcagcttcaaaagctgaagctcgatccgaagattgaggaaaaggtaaaacgtgaaatcgctaaatttaccaaaatgccgccgagctccgcagacggcagcgtcatccgcaattacgtggagacaattttggaattgccttggcacaaatcctccaagaccaatgctgacctcaaaaaggcggaacgcattctcaacgaggatcactatggacttgaaaaggtcaaggagcgtattctcgaatatctggccgttgtgcacctcaataaggcgatcaaaggtccgattatttgtctggtaggacctccgggtgtcggcaagacctcgatcgcgaaatccatcgctcgcgcgacgggcagagagtttgtccgcatgtcgctgggcggcgtgcgcgatgaagcagagatccgcggacacagaagaacctacattggcgcgattccgggacgaatcattacctctatcaaagacgcgggcaaggataatccggtcttcctgttcgacgaagttgataagatcggcgcggactttaaaggggatccggcttcggcactgctggaggtgctggacccggagcagaacaaggaattcaccgatcatttccttgacattccgtttgacttatccaaggtcatgttcattacgacggcgaactccaccgaaacgattccgcgtccgcttttggacagaatggaagtcatttcggtaccgggctacaccgaggaagaaaaagtaaaaatcgcgcagcagtacttaatcccgaagcagattcgggcacatggcttgaagccgaagaattttttgatcagtgagaaggctatccgcgatctgatcaattattataccagagaatccggcgtgcgtaatttagagcgcgagatcggaagtctctgccgtaaggtcgcgcgtaagattgtttctaaaaaagggaacgcttttcgcattacgccggcgagtctggaaagctatctgggcaaaaaaagatatcattacgatgtcgtggaaggcgagagcgaggtcggggtaacgaccggcatggcatggacacaggtcggcggcgatacattgttcattgaaacagcagtcgtgccgggaaccggcaagattcagctgaccggacagcttggtgacgtgatgcaggaatctgcgaaggcggccatcacttatattcgttcaattgcgggcgagtacgggatcgatgaagaattctataagaagaacgatctgcacgttcatgtgccggaaggcgcggtgccaaaggacggcccgtccgcgggcgtaacgatgttcacctcggtgatgtccgcgctgacaggcaatccaatccgtaaggacgtggcaatgaccggagaaatcacgctgcgcggtaaggtgcttccggtcggcggcatcaaagaaaaggtgctggcggcacaccgcgcgggcattcgcacgattcttttgccgcgtgaaaacgaagcggatatcgaagagatcccgcaaagcgtgcgcaagcagctcactttccacctgctcgataaagccaaggaggctttggaatatgcgatggtaaaagattcagagtga

SEQ ID NO: 119 - DNA, 1125 bp, Unknown
  Unknown gut bacteria
atgagaaaagagtgggaaggatttgtcgcgggaaactggacagagcacattgatgtagaggaatttattaaattaaactaccatccgtatgacggtgacggcagtttcctcgcgggaccgacagagagaaccaaggaatgcagtgacaaggtgcacgagcttttggtcgcggagcgcaaagcaggcggtacgctgaaggttgacgcgagccgcatcatgcgcgtgaacgcattcggccccggctacatcgttccgggcaaggatatcatcgtcggactgcagacagacgaaccgcttaagagaggtatttgcccgttcggcggcatcaagatggtcagagaagaagtgaaggagtacggcgttacactgccgccggaaattgacaatatgttcaactacttcacgacgcacaacgacggcgtttttaaggcatactccaacgaaatgcgtcaggtcagacatctcggcttcattacgggacttccggacgcttacggccgcggcagaatcatcggtgactacagaagagcagcgctctacggcatcgactatctgatcgaggaaaagcagaaagaccatgaaatgatcgcttccagacacgtgatgaacgaagaaaacattcgcaccgcggaggaagtcagcaatcagatccgctccctcaaggaaatcaagaaaatggcagaaagctacggcttcgacatctccggaccggcgaaagacgtcaaggaagcgatccagtggacctacttcgcgtatctggcaggcatcaaggaagaaaacggcgcggcgatgtccatcggcagaacctccacgttcatcgatatctacgcagagagagaccttgcgaacggcacctacaccgaagaacagatccaggaattcgtggatgactatatcctgaagctgcgtgttgccagacatttgagaaccagtgaatacaacgagctgttcggcggagacccgatgtggattaccgaaggtatcgcaggcgtcggcatggacggcagacataaagtaaccaagaactcttacagagtgctgcagaccttatacaatttaggaccggcaccggagccaaacctgaccgtattatggtccgaaaagctgccggaaccgttcaagaag

SEQ ID NO: 120 - DNA, 1803 bp, Unknown
  Unknown gut bacteria
atggattatcagcagagaaaacaaatggagcgcaagagagccgaggatttcatcgcgagcattaacgcgatgcaggatccggatattatgtacaaagtcagccatccgatcaccgatctcaaggatatgatgaaccagagcgtagcgcgctacggggcggatcatgtcgccttcaaacagcgcttcgtgaagggggagccgtttcgcgagattacttacggacagacactgaacgatatgaacgcgctggggacagcgatgctggcgcgcggcctgcgggacaagcgcgtggcgatcatcggagataattgctaccagtgggcttcaacctatctggcggttacaggcggggtaggcgtggtcgtgccgctggacaaggaactgggcgcgtctgagctggagcagttaattatcgaagcggaatgcgaggcgattttctttacaaaaaaatttctcagcatctttaccgatatgcgcgagcgcggtgagacaaagctgcgtatgcttgtgaatctcaacgcagaggcggcggcagacggcgtcgaaagctggtccgcgctgattgcggaggggcgggaaaagatcgcggcaggcgaccgttcctatctggacgcggaagtatatccggatgagatgggtgtgctgctgtttacctccggcacgacgggcatcgccaagggcgttatgctttcgcagacaaatatctgctgcgacctgatgagcgcgccgaccctgctggacaccaacgagcgggatactttcttcagcgtgctgccgatccaccatacctatgagtgtacctgcggctttttgatgccgatgtataagggtgcctgcatcggatactgcgaggggctcaaatacattcagaagaatctgcaggagatccagccgacgttctttttgggtgtgccgctgatctttgagagtttgtacaagacgatctggaaaaatatccgcaagcagggcaaggaagccacggttaagaaagtgatgaagctcaacaagaccacttctaaattcggtctgaatctcaataaattgctgctcaaggatatcctcaaggtctttggcggcaggatggatatgatgattgcgggcggtgcggcgatcgacccgcagattctgcagtttttccgtgatctgggcatcatggcgctgcagggttacggtttgacggagtgcgcgccgatggcggccttgaatcaggatttagagccacgcaacgattcagtcggtcatgtgctgccgggcatggaagtcatgatcgcggacaaggatgaggacggtatcggagaaatctgcctcaagggaccgaacgtcatgttaggctattatcacatgccggaggaaaccgcgaaggttatcgtcgatggctggtttcacaccggtgacctcggttacaccgacggtccgtatatctatattaccggacgtaaaaagaatgtcatcattaccgcgaacggcaagaatgtattcccggaagaactggaatattatctcggcaagagcacgctggtttcggagtccatggtctgggcttcacaggacgcggacggacaggacgctgtgatcgtagcgaccatcaagccggatatggaggaagtggaagcagagctcggcaaggaagcggcgcaggatccgaagaaggtggaagcactcttatggagcatggtggataaggtcaacgcaaacctgccgctcttcaaaaagatccgccggatcaacgttcgcaaggaagactttgaaaagaccaccggcaagaagatcaaacgcttcgtggaatccaataaacagcagtaa

SEQ ID NO: 121 - DNA, 1617 bp, Unknown
  Unknown gut bacteria
gatgcaccggcagctccgctggtaggcagagacaaactgcacacggaattcttaaacgatattctggtaccgactgcgaatctgaccgctgacaacgttccggtttccaagtttatggataccgtaaccggcatgatgcctgcgggtaccgcggcttacgaaaagcgcggtgtcgcggcggatcttccgcattgggacgtgaagaactgtatgcagtgtaactggtgcgcgagcgtttgtccgcatgccgtcgttcgtccgttcgtgatgaccgcggaggaagcggaaggcgttgctgacgcagtaccgatgaagggcgcgaaggacaagaagttcacgctcggctggtctctgatggactgcacaggctgcggttcctgcgcagaggtatgccctgcgagaaacaaggccatcaccatggcaccggcagaagatcacttcatgcacgcggcacaggcaaaatacgatcatttatataagaatgttgacgaaaaggaaacgccgttcaaggaaagcaccgtcaaaggtgcacagctcaagacaccgctcatggaattctccggcgcttgccctggctgcggcgaaactccttacgcgaagctggtaacccagttgttcggtgaccgcatgttcatcgcgaacgcgacaggctgctcctcgatttggggcgcttccgctccggcgacaccgtataccgtaaacaaagagggcagaggtcctgcatgggcaaactccctgttcgaggataacgctgaattcggtttcggtatggcgacctccgtcaacgcgagaagaaacgaattgaagtccgcagtcgaaagactgtatgacgctgtcggcgtgccggcaaaggcgtgggtggcttccatgcacgacggcaaaacctccaagacaaccggagaagttctgctggaagcggcgaagaagctcgcggacactaacgaagacgcgaaatatgtcgttgagaacgctgacctgctgaccaaaccatccatgtggatcttcggcggcgacggttgggcttacgatatcggttacggcggtctggatcacgtcattgcgtccggcgaagacgtcaacatcatggtattcgataccgaggtatattccaatacaggcggtcaggcatccaaatccacaccggtcggcgcggtcgcgaaattcgcggcttccggtaaggcagtcaagaaaaaagaccttgcgcagatcgcaatggcttacggctatgtctatgtcgcgcagatcgcgatgggcgcgaacccggaacagacactcagagcaattcgcgaagcggaaagctatcacggtccttccctgatcatcgcttacgcgccttgtatcaaccacggtgtcaaagccggcatgaacaagtccatgctcgaaatgaagaaggcagtcagagccggatactggaacctgttaagatacaatccggagctggaagcgaagggcgaaaatccgctgtccgttgactccgctgcaccgacagaatcctacagagatttcatcatgggcgaagttcgttacaactccctgaagctcggattccctgaaagagcagaaaaactcttcgaaaagggtgaagaatgcgcgatggaaagatataaggaactgaag

SEQ ID NO: 122 - DNA, 1218 bp, Unknown
  Unknown gut bacteria
atgtataactttgtacttgcatttgtaatctgtgccgttgtttacatcatcggcgaggtggtcgcgactgtgaccaaggcatgggttccgtccgtattcgtcaccgcggtggtactgctgatcggatactggactgttatcccaaaaacagtagtcagtgattctgtactgattccgttcggaagcagtatcggtatttatctgttgattacccacatgggtactgtcatcagtttgaaacagctcaaggaacagtggagaaccattgtcgtttgtctggcaggacttgccggcatgatggtactcggctatttcgtcggcagtctggttatggacagaaacctcatcatcgcaggtcttccgccgctgaccggtggtattatcgccgcgacgatgatgcagaccgcagcgcaaaacgcgggactggagctggcagcggtattcgcaatcgcgatgtactgtattcagggctttatcggctatccgctgtccacgatctgcctgcagtcctatggcaagaagcttgtcaagggcctgcgtgacggctccatcgtcattaccgagcaggacagaattgaaatggcaaacgcgggcatgaccgcggtgcctaccgatgacggcaagaaaaaactgcttccgccgattccggcaaaatacaatacccctgtgatgatgctcttgaagctcggtatcgtagcatggctcgcgagcctgatgggcactgtgtccttcccgatcatcggcaccatcagcggcgcgatttgggcattgatattcggtgttatcttcaccaccatcggtttcctggattctaatttgctgaacagagcgaactccttccagatcacgatgttcgcactgatgatgtacgtattcgacggactcaaggactgcacaccggagatgctgaagcagatcatcggaccaatgctgatcctcatcgtcatcggcgttgccggcatggccttgttctcattcatcatcgcgaagatattaaagatgtccttcccgctggcgtttgcaaacggtctgaccgctttatacggcttcccatgtgacgcaatcatcacagagtccacctgcaacggcgtcggacagacggaagaagagagaaaatacctgctgagcaagatgttcccgtccatggttgtcggcggcttcatcacagtaacgattacttctgtatttatcgcaggcgcatttgcgaaattactctaa

SEQ ID NO: 123 - DNA, 1824 bp, Unknown
  Unknown gut bacteria
atgggactaaaaaaactggtcgttgacgccttggcgctcggcccgacatcgagaggttttacaggaggagaagcgcgccgctgggtgcgggagtcttacaggcacagaacccgtaactacggattttccaaaaaagatacgcgctgggcattgcggcacggcttcctgccggaacaggccgccagacttggcatcactgccgagaacgtcggcgactatatctctgcgaaggactacgcgtttttaagaccgctgaacggaacctacagcaagtggatcaccgataaggtaaccatgcacacgatttttaagccgttccgcggttatatgccgacactctactatcaaatcagcaagcgctacgatgaaacggtgctgattcctctgtacgacgacaacgcaggtgacactttcgaggatcttttcgcgttattgcaggaaaagggcagcctgacggtgtcctctgccaatggtggttacgcgagtacgctggagtatcgggatggtgtgttttatctggagggcagagaacgcccgaaggagagaattcaggaaatcctcagcgattaccgcgtaacactggtagtcaaagaacaggtagaactcagcgaagataccgattacggtgtactgaatctcatcgttttcaatgagtttggtgacaatcccgtcatcggtgacggatacttcgtctttgacgaatacgaaaagacttctctcaaggtgttggcgatgaagcactcggacagcttggaagaagccgatgtcgaggatgatatctatcgctttgtcaaggcggagccttgcgatgtgaccgaaggcagctggcgcggcaaaccgattccgcattgggacgaaattgcggatgtgattcgtcgcctttgcgtatttgtgccgcagctggagtttttctgcgcggaaatcgtgatttccgcggatggtttcaaaattgttaatctgctcaaccatccggaatatccgaccgcgaaaccgttcagcaaggaaacctccgcgtatctgaagcgtaaagtagaacaaaaaaaagaagcctacgcgaaagcgggggtcagaatcagtcgcgggctgcataagatgcatctgcgtattcgcgcgaaattcgcgcgcgccttctatccgaaggggctggtgccttaccagtctacccgttggatttctaatgtctggacagatttttggaccaataaggaggcgaccctccgagaaaagctgtgggcgtacaagcatggatttttgtcttaccgcatcccacaatacggcatcaccgaggaaaatctcggagaatacatttccgattttgaatacaagtggctgcgtcacattaacccaaaataccggaagtggatggaggataagattacggtcaaatatgtctgctcggactacaacgactgcttcccggcttactattaccatatcatctgcaagaacggaaacaacaaggtaatctccatgatggatctgccggagggttacaccaacaccttcgacgagatcttccgtctggtggagcaaaaaggcgtgctcgcgctcaagccggatgaaggttcacatggagacggcttctataaattcacctatgaagacggcaaataccagctcaattatcaggacgtaacgaagcagcaggtgttggatattcttgaagatatcaacaaccagtatctggtaaccgaatatatcaatatgtgtgacgagctcaaggctgtctatgacggcgcggtcaatacggtgcgcatgatcgttttcaaaaaggacggcaagaatccgcagattggcaatgcctatgtgcgtttcggctccaaa

SEQ ID NO: 124 - DNA, 1602 bp, Unknown
  Unknown gut bacteria
atggcaaaagaaaaattaaactgggaagatgaacaggttagacatacctacagacataccgcgtctcacatcatggcgcaggccatccagcacctgtggccggacaccaagttcgcgattggaccggctatcgacaacggattctattacgatatggagtgtgagcataaattcagcgaagaagatttcctcaagattcagaaggaaatgaaaaagattgtgcagcaaaacctgccgctggtcagaagcgaggtttccagagaggaagcacttcaattctttaaagagagaaatcaggactacaaagtggaactgattgaagacctgccggaggatgcggtcatcacgatgtatacacagggagattttacggacctgtgcgcggggccgcacatggaatccaccggtcagattaaggcgttcaagctgatgagcgtggcgggcgcttactggagaggcgattccgacagacagatgctgcagagaatttacgcgactgcattcccgacccaggaagaactggatgcctacgtcgaaaaattggaggaagcgaaaaagagagaccaccgcaagatcggcaaggagatggatctcttcatgctgaccgaggaaggtccgggattcccgtttttcctgccaaagggcatgatcatccgcaatgagctggaggctttttggagagcggagcataagaagagaggctatgaagagatcaagacaccgctgattctcaacgagcatctttggaggacctccggccattgggatcactataaggacaacatgtatttcaccaagatcgatggcgaggattacgcgatcaagcctatgaactgcccggggtcgatgctggtatacaagcgtaaaatgtggtcctaccgagattttccgattcgctgcggcgagctcggacaggtgcacagacatgagctttccggcgcgctgcacggtttgatgagagtccgtaccttcacgcaggacgacgcacatatcttcatgctgcctgaacaggttaacgatgagatcaagggcgttgcgaaattctgcgatgatgtctataaaatgttcggtttcgagtatcatgtagagctttccaccagaccggaggactccatgggaaccgacgaagaatgggaaatggcagaaggcgctctcagaaacgccatcgaggaaatgggtgttccgttcgtcatcaacgagggcgacggcgcgttctatggcccgaagctggacttccatctgcaggattccatcggcagaacctggcagtgcggcacaatccagcttgacatgcagatgccgcagagatttgatttaacttatgtgggatcagacggtgaaaaacacagaccgatcatgatccaccgcgtcatctttggttcgattgaacgttttatcggtattctgatcgagcactgcgccggcaaattcccgctgtggctggcacctgtacaggtaaaacttctgacggtcaccgaaaaattcgcaccgtacgcacaggaagtcgccgcgaagctggaagaagcgggtctgcgtgtggaaacggatatcagaaacgaaaagatcggctataagctcagagaggccagaaacgagagggac

SEQ ID NO: 125 - DNA, 1098 bp, Unknown
  Unknown gut bacteria
atgttagacatcaaacgaatcagagaagactacgaaggcgtcaaggccggcgtagagagaagaaccaagggcagcttcggcatcgagaagattccggcactggacgaaaaaagacgcgcggttctggcggaagtggaagcgatgaaaaacaagcagaacaccgtatccaaggaaattccaaagctgaaaaaggcgggggaggataccaccgcgatcatggcggagatgcgggaactgtccgacgaaatcaaggtgctcgatgcacaggtttcgcagctggacgcggagattaaggataccctcctgaacatcccgaacgtgcctgcggacttcgtgcaggtcggcgaggacgacagcgcgaacgttgagattcgcaaattcaaagaaccgaccaagtttgacttcgaaccgaaggcgcactgggacatcggtacggatctggatattctggactttgaaagagccgcgaagatctccggcactagatttaccgtttataagggactgggcgcaagactggaacgtgcgattatgtgcttcatgctcgacctgcatacgctggatcaggactacaccgagatcctgccgccgttcatggtcaaccgtgcggcgatgaccggcaccggtcagctaccgaagtttgaagaggacatgttctatgtgccgcagaaggactttttcctgatcccgaccgctgaggttccggtcaccaatctgctggcgcaggagatcgtaccggaggcagacctgccgatccactatacggcatatacgccatgcttccgcgcggaggcgggctccgcgggccgcgataccagaggcctgatccgccagcatcagtttaacaaggtagagctcgtgaaattctgcaagccggaggattcctgggacgagctggaagcgttgaccaaggacgcggaagcggtgctgcagattctcgatatcccgtacagagtggtcagactgtccaccggcgaccttggattctcctcggcatgcacctacgacatcgaggtttggatgccgtcctacggcagatacgtggagatttcctcctgctccaacttcctggattatcaggcaagacgcgccaacatc

SEQ ID NO: 126 - DNA, 1269 bp, Unknown
  Unknown gut bacteria
gaaaacattctgcttaaccgcgagccgaagaaatccaacgtggtctccgaaatcttcggcgaccgcctcaatacgcttgactacaagcagatgaacgaacgctcggcagaagccatcaagaagatgggcgttcatatcgaccagcatatggtcatcagcgacatgccggtcggtcacaagcagtttacggaaattgcgcgagagctcagcaaggacaacctcaagctgctcattctcgacgagccgaccgcggttctgaccgagaaggaagcggcggcgctgctgaactccatccgctcgatggcagcgcgcggcatctccgtgattttcatcacccaccgtctgcaggagatcctgtccgtgtgcgacaaggtcgtcatcatgcgcgacggcgtggtggtcaaagatacccccgcaagtgaaattgatgttcccgagattacgcgctgcatggtcggcagatcggtggatctgtcgtctgaaaagcgcgaaatcgtcgatcattcgaatgcaaaaaccattctatccatccgcaatctctgggtcgatatgccgggcgagaccgtgcgcaacgtgaccctggatgtgaaggcgggcgagattctcggcatctgcggtcttgccggtcagggaaagctcggcatccccaacggcgtaatgggtctttatgaagcaggcggcaccgtcgagtttgacggcaaaccgattccgctcaacagcccgagaaagtgcctcgacgcatcgcttgccttcgtctccgaggaccggcgcggcgtaggtctgctgctcgatgaaacgctggagtggaatgttgcgttccccgccatgcagattcagaacaaattcctcaaaaaaatcggaccgatcacctggcgtgatgaaaaggcaatccatgatataacccagaagtacatcaacgagctgatgatcaagtgcaccagttccctgcagaaggcaagagagctttccggcggcaaccagcagaagatctgcctggcaaaggcgttcgcgctggagccccggttcctgttcgtttccgagccgacccgcggcatcgacgtcggcgcgaaggcgctggtgctcgacgcgctgcggcgcttcaaccgcgagtccggcgtcaccgttgtgatgatctcctcggagctggaagaactcagacagacctgcgacaggatcgccatcgtttcgggcggacgcattgccggcattttgcccgcaaccgattcctccgaggcctttggtgctttgatggtcagtcaggtgaaataa

SEQ ID NO: 127 - DNA, 1206 bp, Unknown
  Unknown gut bacteria
atggaaggatgtgtgagtgctttggctggactgtccgcagtaatctttattcctgatgatacgcccaaaaccggtttttcccgcccaatgatgctgcaaaatatcatgggtacgcctttgctatcctggctggcgtcctctttgattgccggcggcgttgggcggttctttttggtctgccacgagcggttcaagcgcgaggcgcgcgcatgcttcccggacgatgtggagttcagctgcccgtcggtcgaggcaacgagcgaccagctgcacgtgtttttatccacagcggacgagtcggaagaggacatcattgtggtgacgggtcctgcggtgattctgccgtttgcggcggaagaagagcagttcgattccgcgccgattgtcagccccgtgacctccgtctccaagcaggcgctgatggcggcgctggacgaaaaattcatcttcaccgcgtttttgaaggaccacggcgtgccgtataccgaccgcgacggcgtgtacggtgtggcagacctgcaggagatgaccagctggcagccggttctctcgcgggcaaagctgtatgagctttcgaagcagggcgtcgagatctgggactacaacacgacgtatgtggacccggcggcttccgtcggaccggggacggcgctgctgcccggaacgattctgcgcgggcagacctcgatcggcaaaaactgcacaatcggaccgaacagctatctggaaaatgcacgcatcggcgacggcacgaaggtcaacgcctcgcagatctataattcctccgtcggctacgacacgcacgtcggtccctttgcgtatgtccgcccgggcagcaccgtcggaaacgcggtgcgcgtgggagacttcgtggagatcaagaactctgccatcggcgacggcacgaaaatctcgcatctgacctatgtgggagacagcgacgtcggcaagaacatcaacttcggctgcggcacggtgacggtcaactacgaccgctcaaaaaaataccgcaccgtcattgaagacaacgccttcatcggctgcaacaccaatctcatcgcgcccgtgcgcgtgggagagggcgcgtatattgctgcggggtctacgatcaccgacgatattcccgcgatggcgctttccattgcgcgcgcccggcagcagaacaagaaggactgggcaagcaaacacaagctcaaggaaaaataa

SEQ ID NO: 128 - DNA, 1083 bp, Unknown
  Unknown gut bacteria
atgggaggacggaacatggaactgacagaacgaaaaaagcagattctgcgggcaatcgtagacagctacatccgcacggcagagccggtcggctccaaaacgatctcccagctgccgggcatggacttttcgccggcgaccatccgcaacgagatggcagacctgaccagcatggggcttcttgagcagccgcacacgtcggcggggcgcgtgcccagcgcggcgggctaccggctgtatgttgacgagctcatgcagaactaccgcctgtcgatggacgaaacgaagaccatcaatcaggcgatggaggtcaagatgcaggaggtcgacaagatgatctcccaggtcggaaagctggtctccaaaatgaccgatcttcccgcctacgccgtcgcggccagaagctcgcagcggaccgtcaagcgctttgatctcattctggcagaagcaggaagttttattctggttgtcatgttaagcgacaatcaggtgcagaataagctcatccgcctgccgctggatgtgtcgcaggaggatttgcggcttctgtccgcggttctcaacgcgagcctcaccgagctgacggcggacgaaatcacgccggagcttctggcaaaggtcacgcgcagcgcagccggtgcggcaagcctggtgccggtgattgtggattacacggtggaactcctgaaaaagacccacagcgaggtttacatgaccggtcaggcaaagctgctcggtcagccggagtatcacgacgtggaaaaggcgcaggaggttttgacaagcctcgatgaagacgtcatttccaatcttccggcaacgctttcgtccggcacgacgcagattctggtcggaccggagaatgtggcaaaggaactgaaagattccagcgtcgtcattacaaagttcgatatcggcgacggcatgcagggcatgatcggcgtcgtaggtccgacgagaatggattacgcgaagatcactgcgcgcctgagctattttgccgagaatctcggcaggatgttcgccaagccccagcagccggcactgaacgagcctgagcttcccgaagaaccgaaaatataa

SEQ ID NO: 129 - DNA, 699 bp, Unknown
  Unknown gut bacteria
atgtattgtgtcaattgcggtgtggagcttgccgacagcgaaacggtctgtccgctttgcgggacgcgggtgttccaccccgatcttccaagaaaacaggcgccttctccctatccggcggacccgcacggaaagccggaggaggtcaaccggtcgggaattctgtttgtgatgacgatgctggcgcttttgccggcggtcatctgcctgctgtgcgactggcgcatcaacggcgggattgtctggtccggctacgccgcgggcgcaattgggcttttatatgtgctgattgtgctgccgatgtggttcagtcaccccaatccggtcgtctttgtgccggtggattttgcggcaatcgggctgtatcttctgtatatcgatctggtgacgaagggcggctggtttttgtcgtttgcgtttccggtcacgggggcaatcgggctgctgttaacggcggtggtggcgctggtgcgctatgtccatgcggggtatctgtatatcttcggcggcgcgctgctgctctcgggcggtcttgcggttctcattgagttcctgatcaatgtgaccttcggcatccataaggcgcttttgtggtcgatctacccgctggcagcgggcgtgattctgggcggcatgctgctcgtcatcgcgatctgcaagcctctgagaaaatcgctgcaccgaaaattcttcttttaa

SEQ ID NO: 130 - DNA, 846 bp, Unknown
  Unknown gut bacteria
cgcaaggacggtgtgctgctgcgcaacctggacggcatgcacttcattacgccgatcatctatcccaatcgctgcgacaatgaagcctacatctccgaaaccatcgatctgaccaacatgaatgcgtatctgcagaagaagaatgcgcagagcgccgacttcccctatacgatgttccacatcatcgtcgccgcgctgatcaaaaccatcacgctgcgtccgaagatgaaccgcttcatcgccaacaagaatttctatcagagaaacggcgtgtcggcgtcgttcgtcgtcaagaagcagttcgcagacgaagcggcggaggcgcttgccgtggtgcgtggaaaagatgaatcgacgcttgataccatccacgaggacctgcgccaccagatcatggactgcaaggacatgacgaagaccgatacctcgacggacttcatggacatcttcaaccgcatgccgcgctggctgggtaaattcatcgtctggattctcacgcggctcgacgttcacggctggattcctgcgtcgatcattgagacagacccctactactgcacagtcgtcatttcgaacctcggctcgatcaagctgcacagcggctaccatcacctgacaaactggggcacctgctcggtgttctgcatcatcggtgaaaaatcgctgcgcccggttttccagcccgacggcagctacgagatgcacgagatgctggatctgggactcacgatcgacgagcgccttgccgacggctactattactccaagacaatcaagctgctgagaaagcttctggaaaaccccgaactgctggagacgccggcaaatcaggaaatcgaatactga

SEQ ID NO: 131 - DNA, 1203 bp, Unknown
  Unknown gut bacteria
atgaaaagaagaattcttgcgcttctgcttgtgtttgcaatgttcgccgcgctcatgaccggctgcgcatccggcaagcaggagacggctgcgaacgacaccgcgcagaccgaacagactgcgcccgagcagacggcggaatctgccgcagaggaaaccgaagctgcggaagagactgccgaaccggcggaggaaaccgccgcagaaccggaaacgcttgccttcaccgacagcctcgaacgagaagtcgagctgcccagggacatcacccgcatcgcgcccagcggcgccgttgcaacgatgatcctcgcggcaattgccccggagtgcatggtcaccgtcaacgcgacacccagcgagagccagatggcatttttgcctgcgaacctcgcgtcgctgcccgagaccggtcagatgtacggcagcaaggcaaatctgaacctcgagacgctgctcgctgccgacccgcaggtcgtcattgacctcggcgacaagaagggcgacatgaccgaggacctcaacgcgctgcaggatcagatcggcatccccgttatcttcatcgaagcagatcttgcgcatatggcagaggcgttccgcatgctcggaaaccttctgtcgggcaagactgaccgcgggcaggagcttgccgacctcgtcgaccgcacgaccacaatggcagctgagaattccgcaaagatcaccgatgacatgcgtctgcgcgccatgtacaccaccggcgaggacggactcggcaccaacgccgcaggctccattcaggcgcaggttctggacatggtcggcgtggagaacgcagttgttgttgaggacgtcagcaataagggcggcggcaatgtcatcagcctcgaacagctgtataactttgatcccgacgtcattctctttgccgacggcagcatctatgacaccgtgaccgacgattccgcatggtctcagctgaccgcgatttcgaccggaaaatactatgaagtgcccggctccccctacagctggctgtccggtcctccgtcgatgaacatgatcctcggcgtgtggtggctcggcaacctgatctatccggaaatctatgactacgacatggcggaaatgacgcaggagttttacaagactctctggggctatgagctctcgagcgacgaagtgactgcacttctggcgaattccaccctcaaggcagctcaataa

SEQ ID NO: 132 - DNA, 1833 bp, Unknown
  Unknown gut bacteria
ttggcagaactcaagcttatctcgccgctgctttccaatatggaagtagtcgagtgtgtgagcgttcgcggcgcagccgcagtatatatcgtcagaagcaccaaaagcgggcagacctacgttctcaagcacatctccgtgccggagtcgcagaagcaggtcgacgcgctgatgttcaccggagccgccgccacaaaggaagacgcgcaaaaatattatgagcaggttgtttccgattatcagacggagctgacaacgcttgaaacactctcggcaagcccgaatctcgattgcttccgcagctatcagatcgcgcccaaggaagacggcgtcggctacgacatgtatctgcttgccgagcatcgcaagacgctcgtcgattacttatccgacaacgccatgacgaagctctgcgcggtcaatctggcgatggacctttgcagcgccctcatcgatctgcgtgcagcggggctcattcaccgcgacgtcaagccgtccaacatctacttgaacgcacaggggcatttcctgctcggagacctcggcatcgcgaaaatcgacgatctcaaatactgcacgatgcccgagagcatgctcagctcctactccgcgccggagctgttcagtctgctcggcacgatcgagccaacgacggatatttattccgtgggcttgattctataccggattttcaacggcaaccacgcgccctttgaggacgaaaacacgtccgcgaaggcagcggatcgccgcagagtcaccggcgaggcgctcccggttccgatgtacgcggactacgagatttccgaaatcattctcaaggcgtgtgccttccagcctgccgaccgctaccagagcccgcaggaactgaaggacgcactggtcgagtacatgaagcgcaaccaggtcgacgacacgctgattgttcccccgatcgcgggtgagcacgagccggtcgatctgacgcaggaggaagaaattgagccggtgcagtttgcagacaccgattcgctgcccgaggatttcaaggagaacttctcgccggacacgcagatgctcaactcgctcatcgactcggtccataaagaagcgcagaaggacccggagggctatggcatctccgggtctctggagccggatgaagaagacgacgcaccgctggatgattccggcgcgcccaaaaagcgccgcaaaaagagccgctggcttcccatcgcgctgtgctgcctgttgctgattgccggcatcggcgcggcggtctacttcttcatcattgcgcccagcaatctgcacatcaacgagatcacccttgtggacaccggcacggactatctgaccgtgcaggtcgattccggcgaaaaggaaggctcgttccaggttgtctgctccgacacctacggaaacaagttccaccagagcttccaggcaaagacagaccttaccttctccggtcttgtccccggcacacagtacaccgtgaccgtcgagccgcagaacggagaaaccccgaccggcaattacacgctcatggcaacgacgctcgcgcagacggagattctgagcttcacggcaacgcctgtctccgtgacgcaggcggagctgaacctcatcattttggatggacccgaccccggcagctggaccgtcagctatgcggcagagggacaggaagcgcagaccgcgaccttctccggtcacagcaccgtcattgcaggtctcgcctccggcaccgagtatacctttaccctgcaggagcctgagaacacgaagctcatcgggcagacgagcgcaacgttctctacggttccgaccgtcagcatcgtcccgccgctg

SEQ ID NO: 133 - DNA, 1167 bp, Unknown
  Unknown gut bacteria
ggtctgccgacggcaattacgtttacgctggcgggcttcgaggtctgcgggtttgatgtgaagcaggaggtcgtcgaccagctgagcagcggaaaaatccacattgtagagccgggcttgcaggatgcgctgacgcaggcgcttgccacgggtcggctgcactttacgacgaagccggagccggcagatgtgtttatcatcgcggtgcagacgccgtataaggaaaccgaggatcacaagcgggtgtctgacatgcgctttgtcgagtcggcggcgcgcgaggtcggttcggttgcgaagccgggagatctttgcgtgctggagtcgacgtcgcctccttattccacgcggctggtggagtcgattgtggcagaggtcagcggcatgaacaggagcgattttatgacggcgcactgcccagagcggattatccccggcagaatgcttctggagctgcgtgaaaatgaccgaattatcggctcgaatcgcccggaggctgccgagtacgcgaagtcgatctatgagaaggttgtgaccaagggcacaatccggctgacggacgacttaacggcagagatgtgcaagctgacagaaaacacgttccgcgacatcaacatcgcctacgccaacgagctgagcaaggtctgcgaccggctgggcatcgatgtgtttaatctgattgagctggcaaactgccatccgagagtcaacgtgcatacgccgggcgtcggcgtgggcgggcactgtatcgcggtcgacccgtggttcatccatgaaaaatttgaggacattacgccgctcatttacgaggcgcggacagtcaacgacggaaagccggcgtgggtcgccgagcgcatcgggcgcgacgtcaagcccggggcaaaggttgcggtgcttggcatgagcttcaaggcgaacatcgacgacacgcgcgagagcccgtcggtgctgtttgccaatatcctcaaggagaagggttacgaggtgattgcctgcgaaccgtttatccggggtgatgtggcaggatacaaaaatcatacgctggaagaggcaattgccgcgtgcgactatgcggtcattacgctgatgcacacgccgtttgtggaaaataaggcgctgattgcgacgaagccgtattacgactgcgtcggtctgatgcgcaaataa

SEQ ID NO: 134 - DNA, 1821 bp, Unknown
  Unknown gut bacteria
atgaagaatttcaccatgaagcgggtacttgccggcgtcctttgcgccgcgggcgtgatcgcctccgcgcttaccacagcctctgcctgcaccacgatctatgcgggcgcaaatctcacacaagaaaacacgcgctttatcgcccgcagtgaggactacggctcggacatgaacaagctctggttcgtcagcgaatccggcgcttacagcggcacttaccgcggctgcccggaatacggaccgtttacctatgagctgtcccaccccagctaccgcttcacgtacttcaaaaacgacaacgtctacgacggcgtctgccccgagtgcggcgaggaaaatgcgcagcatgcctcctataccgagttcggtacaaatgaaaagggcgtgtccgtctccgccacggaaacgatctccggaaacgacgccgttctgtccgtcgacccctaccgcaacgccggttgggcgcaggaaaacggcaaacccgccggcattgaagagggcgacattcccacggtcctgctcagcgaggcagcgtcggcaaaagacgcgctcaagctgcttctgaacatctacgacacctatggctgcgccgacggtgcggggcttttcatcaccgatcagaacgagagttggtacattgaaaactgctccggcacgcagtatgcggcaatccggctgaacgatgatctgctgttcctggagcccaacatggcggtcatcggaagcgtcgatctggacgataccgaaaacgtgattgcctcgccgaagctcatcgagacggcaaaggcagccggaacgttccaaggcagcgagattgacaacgtgattgactaccgcgccagctacgccggaagactcgactctgccgacaagcgtctggtcgaaggtctcaactatctcaacagcgcctaccgctacgacgcggacgccttagtcaccgacaacagccgctttacgatttccaatcttgacaagaccggcgcgattgtcccgctctacacgaacatctccgccgaccggacgctggatgtcgacgatattctgaactactacaagctcagcaccatcgcaaagtccggcaatcaggagattgaaatcttccagatgttcaaagaccgccctgccgaatacgcaacggtcggctgggtcgcagtcggcgatctggcgtgcaatgtgtttgtgccgtattatccgatgctgatcgattccatgtatgagggctaccaggcaggcacgccgaccgtgcagtttaccaccgaacagccgaccggcggtctgttctacccctattccaagcgctcttacaaccgcgaaaccggcgagatcaccacgaccgacggctaccggattctgcccgagggctgggagaaatcctactactggagctttgaaattctcaacgactacgtgcgctactttgaatctgccgacggctcgaagctcgtcagcgacgcggaccggcagtatgtcaaggcgaagctgaacgacttgcagcaggaattctacagcgatttcgtttccatgcagacgctgcagtcgtcttcgaacgcccgcaagcttgccaccgagaacggcgcggcaatggcaaagaaggcacagcagaccgcgcaggagctgattgcctatctgcagggctccgaggcgctcacgcgcgccgacgcagtctacagtctctggctgcgctccggctctccgaaggcgaagacctccgcgtgcccgtttgcggatgtttcggaaagcgcttactactatgacgccgtcctttgggcagccgaagccggcatcgtccgcggtgtcagcgacagcagctttgccccggac

SEQ ID NO: 135 - DNA, 738 bp, Unknown
  Unknown gut bacteria
atggacgagattctcagactcgagcatctggaaaagacgttcggcacgcatcaggtgctgcgcgacatcagcttttcggtcaataagggcgacgtcatcagcatcatcggctcgtccggctccggcaaaagcacaatgctccgctgcgtgaacctgctcgaagagccaaccggcggcaagatcatctttgagggcaaggacatttccgggaaagagctgaacctgtctcaataccgcgcgcgcgtgggcatggtgttccagcagttcaacctcttcaacaacatgaacgcactcgagaactgcgtctgcccgcagctgacggtgctgcaccgcaagcgcgaagaagccgagaaaatcgcaagagactacttagagcgcgtcggcatgtccgcctactgcaatgcaagacctgcccagctctccggcggtcagaagcagcgcgtggcaattgccaggacgctctcgatgaaccccgacatcatcctcttcgacgagcccacaagtgcgctcgaccccgagatggtcggagaagtgcttgacgtcatgcagcgccttgccaaagagggctttacgatgctggttgtgacgcacgagatggcgtttgcgcgcgatgtgtcgagccgcgtgatcttcatggacggcggcgtcattctcgaagacgccgcgcccgaagagattttcaataaccccaggcagcccagaaccagagagtttttgagccgctacctcgcaagataa

SEQ ID NO: 136 - DNA, 891 bp, Unknown
  Unknown gut bacteria
atgaatacgcagcatttgcaatatctgattgaaatagaacgtacccgctccgtttcccaggcggcggaaaacctgttcatcggtcagccgaacctcagccgcattctgcacgagatggaggcaaatctcggtttcaagatttttgagagaaccagcaagggcgtgcgttccaccgagcgcggcgcaatttttctgcagcacgccaagagcatcatccgggaactcgaacgcattgacgcgctcggagcgcgccacccggtggaaaaccggctgcgcatctgcattccgcgcgcggcgttcattctcgatctgacggcggactatctcaatacgctgccggtcgaccagaatctggactcggtggtgcgcgaatgtcacgcacggcaggcaatcgaaatgctggaaaacggtgaggttgaggtcggcatcatccgtttccgcagcgaataccgcgactattttgaagagcagagcgtctcgcgcggcttcggcttccagatcctcagccgctaccgctatcagctgctgctgcccaagacgcatgcgctggcggagaagcagctcattaccgggcaggatctggcagggcttcccgagattgtccacggcgacacgttccgcaaggggcccaaagtagacgagggcttgcggcggaagatctatacggtcgaccggctggcgcagctgcgccttttggagacggtgccgggcgcctacatgtggtgcgcgccgattcccgaccggtgcctgaccagatggagccttgtgcagaagccgagcaacatcaaccagactgtctaccatgacgcgctggtttatcagctgcagtacgacatgacgcagattgaacgcgggtttgtcgagtttgtgcagcagcgctaccagaagtaa

SEQ ID NO: 137 - DNA, 1029 bp, Unknown
  Unknown gut bacteria
atgggttttgatcatgtaaagctggaaaagggcatgtaccgcgagagcggcaagacgtttacgcaggttctcgaatcgctcgacccgagcgaaaactacaagggcacggcgctcgaggggacggacgccttccagcgccagcttaagcgatttgatatccacgcaaagggtgcgtactcggacccggtggaaaaattcttccgcacgatggactcgagcgtcctgttcccggagtatattgcgcgcgcggtcaagcagggcatggaggaaaacaatgtgctgccgaagattacggcaagcacgacgaccatcgatgcgatggattaccgaagcgtttattcggttccctccgagcaggacaagatgctcatgcaggtatccgagggcgcaagcattccggcaacccaggtcaagacgaaggcgaaccttgtcaagctcaacaagcgcggcagaatgctcgtcgcgtcctatgaggcaattcgcttccagaagctggacctgttttccgtcacgctgcgccagatcggcgcgtacatccagacaatgcatctgaaagacgcggtggaggtgctggtaaagggcgacggcaacaacaacgcggcggcaagctttaccatcggagatagtccgctttccggtacggcaggcacgctgacctatcagcagctggtggaattctgggcgcagtttgaaccgtatgagctcaactgcttcctgatgaataccggcacaatggtcaagatgctggggctgagcgagttccagaatccgctgacgggtctgaacttccagggcacgggcgcactgtcgacgccgctgggcgcggagcttctgaaggcaaactgcgtggacgccggcaagattatcggtctggacagacgatacgctctggaaatggtgcaggcgggcgacgtgtcggtcgagtacgacaagctcattgaccgtcagctcgagcgcgcagccatcacgtcgatttccggctttggcaagatcatgccggaggcttcgaaggtgctggtgatcggatga

SEQ ID NO: 138 - DNA, 852 bp, Unknown
  Unknown gut bacteria
atgctcaccgtgcttgccgccgtgtttgcctttttgttcctgatgccgacggtgctgacgatcacgaactcgttcatgacgcagagcgaaatcaccgccaactacgggcaggtgtttcagaacgcaaccgacggcaagagctacatcaaagacaaaatcaatctgaaattcatcccggacaaagtaagcttcacgcagtattttacggtgctgctgaaaagcccggacttcctctataaattctggaactcggtgattctggtcgcgccgatcgtgctggcgcagctggcggtcgcgtctgtcgccgcctacggcttcacgcgatggcgcggcaaaatccgggacaccatcttctttgcctacgtcattctgatgctcatgccctatcaggtgacgctggtgccaaactatctggtctcggattttctgggactgctcaacacccgctgggcaatcattctgccgggcgcgtttgcgccgttttcggtgtttctgctcaccaagtccatgcgccggattccggcttcgctgattgaatcggcgaagctggatggcgcgggcgagtggcacattttctggaacatctgccttccccagtgccgcagcgcactgtattccagcgccattctggtcttcatcgactactggaacatggtcgagcagccgctgattctgctgcccgatgcctcgcagcagccgctttccgtgtatctgtcgcagatcaacgcgggcgagatcggcattgcatttgccgcggcggtcatttacatggtgccgggacttctgatgttcctgcatggcgaggcatatctcgtggaaggcattacttacgcaggctccgtgaaaggatag

SEQ ID NO: 139 - DNA, 1107 bp, Unknown
  Unknown gut bacteria
ctcaactggcgcgaggcgctgcatttttccacgcagattgccaaggcactcgagcatgcgcattcgcgcggcatcatccaccgcgacatcaagccccacaatatgatgattttgaaggacggcagcgtcaaggttgcagacttcggcattgcccgcatctcctcggcgcagaataccctcacgcgcgaggcactcggctcggtccactatatttctcccgagcaggcgaagggcggcaaggtcgactaccggtcggacctctattcgctcggcgttgtgatgtatgaaatgctcacgggaagaccgcccttcgacggcgatacgcccgtttccgttgccattcagcacatcaacgccaagcccgtcatgccgcgcgaattgaaccctgatattcccgagggcttcgagcagatcaccatgcacgcgatggcagcggatatttccaagcgctacccctcggcgacgcggatgctggcggatctggaaattttccgcaaaaacccgaatgtgattttcgattttaccgacgatcaggacgccttcgatgtggagcgcctgctcaacgaccccgactatcttccagaccggcttccccggcgcgagcgcaagcagccgtcccgggtgtctattccacagcgcaagcagccgcctgcgccgcccgcgcagagccagagcaccaaaaagggcgcaaacgttgcgctgacggcaggcatcgtgtgcatcgtgctggcggtcctcggcatcggctacttcctgtattcgtatttcttctcggacctgttcagccggaccgaggaggtcgaggttccgcagatggtcggacagtattacgagaacttcgaccagagccagtaccccgatctgaccttcgaagtcacggactggcgcgcgagcgacgcttacgagagcggctatgtgatcgatcagagcgcgaacgcaggcacgatggtcaaggttggctccaaaatcgagctgacgctttcgaccggcattgaaagcaatgtcatgccgaacgttgtgaacctgccgctggaaaacgcgcaggactatctgaattcccttcccatcacgctttccatctcggtggattatcaggaaagcgatgtg

SEQ ID NO: 140 - DNA, 1056 bp, Unknown
  Unknown gut bacteria
tcgcaattcaaaacgccgttcggaacgctcctgcccggacagggctgtcggctgcgggtggacattccggtctcgtgccggaccgtgaaggcggaggttattttcctgcaggacgacgctttgaccgaggcgttccgcgcgccgctggcaaaggcagaggcgaatgcgctctacgaggcgtggagcgggggattttcgtttgaaactgcgggcctttatttctactattttttcatcacaacgcagaacgaggcgttccggctttataaacagggaaacgatacgaatatggaggcaggcgacctctggcaggtcagctgcgtgcaagaccgcttccccgcgccggagtatgcaaagggcgcggtcatgtatcagattttcccggaccggttttacgccgcggggcgctgcgactgcacggagaaattacagccgtactgggtgcatgaggacaagcaggacgtgccggtgtatctgccggacgagaacggaaaggtctggaacaacgacttttacggcggaaatctcgccggaatccgggaaaagctttcgtatctgcaggagctgggcgtggagcttttgtatctgaacccgattttcttcgcgttttccacacaccggtacgacacctgcgactacggacgcatcgacccgatgctggggaccgaggaagatttccgggctctgtgcgaggacgcgcatgcgcgggggatgaaggtgattctcgacggcgtgttttcccatgtgggaagcaggagccggtatttccaggacgcggttcccaaccctgaccccaaataccgcagctggttcgacttcaagcactatccggacacctacaccagttggtgggggattacggatttgccgtgcatccggaaggacaacgaggactttttgcgctatatcatagacgacgaggattccatcgccgtgcactggctgcgcgcgggcgcggacggctggcggctggacgtggtcgacgagctgccggaccgttttgtgctgcggctgcgcgagcggattcgaaaggaaaagccggacgcgctgctgatc

SEQ ID NO: 141 - DNA, 753 bp, Unknown
  Unknown gut bacteria
atgaaacagacaatcaagcgggtgctggcggctttgctggcagcgggactgctggttctgtgcgcgtgcagcgcgaagacggcgcctgcgcaggagcaggagccggaacagacggctgcggtggagactgctccggcagagaagccgcaggaagctgcgtcggtggaggaaacgccggagaaagcggaaggcgaagcgcaaacgcccgaagagcagccggaggcggaaaaacctgcgccggaggaacctgcggagcagccgaccgagccggaggtgtgcgcgccgatggacgagcagccgatgcaggagcagcctgatgcacaggacacgccgatgacgtgtacgatcagcatcagctgcgcgacgatccttagcaacacggacgagctggacccggagaagctggagctggtgccggaggacgggtggattctcgcgccggtgacggtggagtttaccgcggggcagagcgtgtttgacgtgctgctggcgacggtgaaagcgcaggcgattcatatggagtatcagaacacgccgatgtatgagacggcgtatatcgagggcatcggaaatctgtatgagtttgactgcggcgcgctctcgggctggatgtaccgggtgaacggatggttccccaattacgggtgcagccggtatgccgtgcaggcaggcgacgtgatcgagtggatgtatacctgcgatctgggaagcgacgtcggcggcagcggcgtgagccaggggtatgtcgagtaa

SEQ ID NO: 142 - DNA, 1218 bp, Unknown
  Unknown gut bacteria
tacggcgacatgatgagctatatcatcgactccaacacgccgctcaatgagcagtactatgacgaagaaaacggcattacctgggcagacaccctgattgagcagggtctgaccagcgcggcgcgcatctacgccatctacgacgaagcagttgcaaacggcgagacgctttccgacgacgatcagtccagcatcgacgccactgtctccaacctcagcgtctacgccacctactacggctactccaacgtcaacggctaccttgccgccatgtacggcgcaggctgcaacgagaagaacttccgcgagttcctctccattgaaacccttgccaacaactactcgcagaaggtctacgacacgcccgtctacaccgaagacgagcttgcagcggactatgccgccgaccccaacgcctatgacaccgttgactaccgcgtgttcgccgtgaccgacgcgctgtttgacgaggaagacgaggaaaagctggctgatctcaagaagaccgctgccgacgagctgcttgccgctgccgaggaaggcgacgaggcgttcatccaggctgcttacgaccacgcctccgaagacaccaaggaaaactacgaagacgacagctacaccctgcgcaccgacgtcggtcattccgactccgatctttccaactggctgtttgaatccgaccgcaaaaccggcgacgccacctgcgtcgagaccagcggcacctactatgtcgcgatttttgagagccgcgacacccacgactacgcgcttccgaatgcccgccacatcctgatctccgtctcggataccactgacgaagaggcaatggcgactgcgaaggaaaccgcagagaagctgcttgccgagtatgaggcgggcgaacacaccgaagacgccttcgctgccatcggcgacgccccctacgcagacggcactgccgcagagtctgcccgctatgaggacatcacgccgggtcagatggtcgaagactttgagaactggtgcttcgacgccagccgccaggtcggcgacaccggcattgtggaaagcacctacggctaccacgtcatgtacttctccggcttcggcacgaactaccgcatgaagctggtggaagacgagcagcgcggcaacgtctacaccgactggctcaccgccactaccgagaacgcaagctatgagaccgttgcctccggcatgcgctttgtgaccaagtaa

SEQ ID NO: 143 - DNA, 819 bp, Unknown
  Unknown gut bacteria
atgctacaggatattgcgccgcatatttatcacaatcaaatgtcttggaaggagccggaggcggacgattttgtgctttgctaccgcgggcggacgctctattgtaaggtggaagacggaagcctcgtgctgccgcgcgtgaaggacgtggagccttccgcgctgcaatatgcgttttcgattgacgagcgggcggactacctgctctcggacgcggaactgaaagaggcaaatggcttttcgtacttcgacaccggcaagctccgcacgctcgtgccaggacctgcgctcatggctgcggcagcaggggaaagcttatatcgctggtacagtgggcagcggttctgcggcaggtgcggaaagccgatggaaaagagcaagatcgagcgggcaatggtctgccctgcgtgcggcaacaccgtctaccccaaaatctgcccggcggtcatcgttgcgattcacgacggcgaccggctggtgctgacaaaatacaaggaccgcccggtcaagcactacgcgctcgttgcgggcttcaatgaaatcggagagtccatcgaggaaacggtccaccgcgaggtgctggaggagacggggctgcgggtcaggaacctgcgcttttataaatcgcagccttgggtctttaccgatacgctgctctttggcttctttgccgagttggacggcagcgacaagattaccgtccaggaggacgagctgtcggaagccggctggttttaccgcagcgaaattccggaggaccggacgcatttgagtctgaccggtgagatgatggaacagttcaggaaaggacttgcttaa

SEQ ID NO: 144 - DNA, 927 bp, Unknown
  Unknown gut bacteria
cccgctgcgggctggcagcaaaaaacctgttttcccctcttgacactcccactgtgtcaggctttacaatacctgtggatccaaaaaatgaactgcatggagggtaccgccttgctgaaaatcggagatttttccaagctgtccagaatcagcgtccgcatgctccggcattacgacgagattgggctgctgcgcccggtctacgtcgaccggttcaccgactaccgctactatgacgagcaccagctgccaaccgtcgggcgcatcacagcgctcaaggacatgggctttcatctggcggaaatcggacaattgctggagctgtatgacgacaaggacgcactcgacgcgcatcttgccgcgcagcagcagcagttggagctgcttgccgcagacaccgcgcagcgccttcgtctgattgcggcagcgaggaaccgcttacgaaaggacgaacctatgaagtacaatgtcacactgaaaacgcttcccgaacgctactgcgccacggtgcgcatgaccattccctgttatgaggacgagggcatggtatggagcgttctgtgcagcgaaaccgctgcgatggcgctggtccctagcgacccctgctactgcgcggtcgaatttctcgacaacgaattcaaggagcagaacgtcgagattatggcgtccaaatccgtaaagggcacatatccggataccgagcacgtgaagttccggacgcttcccgccgtgacctacgccggctgcacgttcaagggcagctacgcgcagatcaacgacgttgtcgccactgtcagcgcgtgggtggaggacaacggctacgactacgccggtcccatgttcgatatctaccacgtcagcccgcacgagacgcagaaccccgacgagtttgtcaccgaggtctgcttcccggttaaaaagaagtaa

SEQ ID NO: 145 - DNA, 861 bp, Unknown
  Unknown gut bacteria
aaggggcacatcgactacatctgccgcgaggcgatcaacaagtatggggccgacccgattctgaccgtcaaggtcgcctgccaccacgccgcgcgctacttcctgctcaacaaccgcggcgccatcgcccccggctatctggcggatttcgcgatcatcgacaatttccggaattttaacgtcgaaatggttttcaaaaagggcgagctgtattataatgacggtaagctcaaggatttccccgcccccgcaatcgaggaatatctcgacgagcgggcgcacgacacgttccatgtccgccatctgacgaagtccgactttgaagacgtgcgtcagcgcggcgtcatcggcatgattccgggagagattgtctccaccgacaacggctatgcggaccatgtggacctgcagaaggacattctgaaaattgccgtcgtcgagcgccacaaaaacaccgggcacatcggactcggctatattcagggctatgggctcaagtccggcgcggttgcaacgtccatctcccacgactctcataacatcatcgtcgtcggcacgaacgcagaggatatggcatttgcggcaaactacatcgtcgaaaaccacggcggcatcgtcgtcgtagacggcgggaaggtgcttgccagcgtcgttctggaaatcgcgggcatcatgtccgacgaaccgctcaccaagatgaacgaggagctggaggcggcaaaggacgcggcgttccgtctcggcgtcagccgcgggattgacccgtttatgacgctcagcttcatggcgctgccggtcattccgacgctccgcatcaccacgcgtggcgtcatcgacgtcaacacccagcagtacatctga

SEQ ID NO: 146 - DNA, 783 bp, Unknown
  Unknown gut bacteria
ggcccctgccgcatcaccccgaaggcgccgcgcggcatctgcggctgcgacgttcacggtatcgttgcgcgtaactacctgcgcttcaccgcgggcggctctgcaacgcactccgaccatggccgtcagatctgccacaccctgtatcaggcaaaagagggcggtgcatatcaggtcaaggaccctgaaaagctgaagagaatcgcacacgaatgggacatcgagaccgaaggcaaggatatctacgatctggcacatgaagtcgctgaggtcggtctgctggaatacggcaagcccttcggcacacagcgctatctgaagcgtgcgccggagcatacgcaggagctgtggcacaaggcaggcatcgagccgcgcgccatcgaccgcgaggtttctcagtcgctgcatatgacccacatgggctgctcgtctcttcctgaggctctgatcaagcagtctctgcgcgccggtctgtccgatggctggggcggctccatgatgggcaccgagttctccgacatcctgttcggcacaccgaagcccgttgacaccaccgccaacatcggcgttatggacaaggacatggtcaacatcatcgtccacggtcatgatccctctttgtccgagatgatcgttttctatgcgcaggatcccgagatgatcgcgcttgccaaggaaaacggcgcaaagggcatcaacatcgcgggcgtctgctgcaccggcaacgaagttgccatgcgtcagggcattccgatggcgggcaacttcctgcagcaggaaaac

SEQ ID NO: 147 - DNA, 747 bp, Unknown
  Unknown gut bacteria
acctcttcttccatgagctcggattccagctggcgcttcaccggtcatctggcaaacctcgagtactactacgagtccgtcgatgatcccaccgcatgggagacctgcccggctaccatcaccggcaactacatgcagaactacaagaacctgtgggatctgtatatcaacaactccgcaacgaaccccgcggacctggctgccggcggccttgacgcacaggctgagttcgcagagggcaaggcagtgttctattctcagggcaactgggaatggtccgcactggctgagaagggcatgagcgctgacgacctgaccatgattccgtactactgcggcgtggaaggcgaagaaaaagccggtctgaactgcggcaccgagaactgctgggctgtcaacgcggaagcttccgaggaagacatccaggcaaccctcgacttcatgtactggatggtcaccgatgctgatgcttcgcgcatgctcgtcgattccttcggcgttatgccttataagcaggcagccgagtccaccaacccgttcctgaagaacgccaatgagtacactgccgaaggcaactatgtcatgccttgggtcaccaacttccagccgaacgttgacgcttaccgcgaagcgctcgtcgctgccatgaaccagtacgacgccgatcagaccgacgccaactgggagctggtcaagaccgcgttcgtcgacggctgggcagtacagtatcaggcagccaacggctga

SEQ ID NO: 148 - DNA, 1056 bp, Unknown
  Unknown gut bacteria
tcgctggacaatctggagcataattatcggacattgcgcgagcatgtcggaaagggaccgagattcctcggcgttgtgaaggcggactcctacggtcacggcgccgtgcaggtcagccggacgctggaagagctgggcgcggagtatctggcggtctccaacctcgaagaggcaattcagctgcgccgcggcggcgtgggacttccggttctgattctcggctatacgccccctgagtacgcgcctgatgaagcagagatgtccatcacacaggaggtccacggactgcagtatgcaaaggacctcaacaaggcgctcgaaggtacgggacgcaagctgacggttcatctgaaaatcgacaccggcatgacccgcctgggcttctttgccgatcagccggagcagacgcttgccgcgctggtagaggttgcacagctgccgaacctttacattgagggcgttttcatgcacttctgcgtgtccgactccaaaaagccggaggacgtggcatttacgaaactgcagcatgagcgctttgtgaacatgctggaccttatgaagtcgaagggcattgagccggaaatccgccactgctgcaactccggcgcaacgattctgcgccccgagtacgcgatggatatgatccgcccgggcgttgcaacctacggcttccatccgtcgcccgacactgtgggcgaaatcgacctgcggccgatgatgagcctgcatacctccatcgcacagatccgcaccatcgcggcaggaaaatccatcagctacggcagaacctacacgacgccggaagacaagctcgtcgcggtcctcccgatcggctacgcagacggtctgagccgtcttctttccaaccgcgtcaccttccgcatctgcggcaaggaggcgcccgtcgtcggcagaatctgcatggatatgtgcatggtcgatatctctgacattcccgaggcaaaggtcggcacaacggcgacgctcgtcggctacgatgaggatggaacgcttctgccgtgcgagcgcattgcggacatgctcggcacgatcaac

SEQ ID NO: 149 - DNA, 1173 bp, Unknown
  Unknown gut bacteria
gcggctaccgtcggcaccggcaacatcgtcggtacctctcaggcaatcgccctcggcggctacggcgccatcttctggctctggctggcagctctgctgggcatgatggtcaagtactccgaagttcttctcgcgatcaagtaccgtgagcgcgacgcgaagggcgactgggtcggcggcccaatgtactacgtcaagaacggcctcggcaagggctggcagtgggtcggcatcctgttctgtatcttcgcagcaatcgccgccttcggcattggcaacatgtcgcaggtcaactccatcgtcggctccatcaacaacgctgtcgacgcgttcatcccgtccgctgctgcggagcgcggcacgctgaacctcatcctcggtatcgttctggcagtcctcgtcggcgtcattctcttcggcggcatcaagcgtatcggcgccgttgctgaaaagctcgtcccggccatggctcttctttatattgtcttcggtcttaccgttatcgttgtccacgcaggcaacatcatccccgcattcggcaagatcttctccactgcattcaacccgcaggcaatcggcggcgcggctgccggtatcgtcctgaaggaaaccatcgtctggggtcttcgccgctcggcgttctccaacgaagctggtcttggctctgcggctatcgcgcactccgcggctgacaccccgggtcctgtccagcagggtatgtacggtatcttcgagtgctttgccgataccatcgttatttgctctctgactgctcttaccatcatctgctccggcgttgagatcccgtttggcgtcaagcccggctctgagctcatcaccgccgcattcgcaactgtcttcggcgataagatcgcttctacgttcgtcgcggttgctctgacgctcttcgcgttcacgacgatcctcggctggtctctgtacggatctcgctgcttccagtatctgttcggtctgaaggctgcttcggtctacaaggctttgtacgtcgtcatcatcgtcgtcggcgcagtttcctccatcgacgtcgtgtgggatatctccgataccttcaacggtctgatggctgtcccgaacttcatcgccctgatcgcgctgtcgcctgtcgtcatcaagatgacgaaggaatacttcttcgacaaaaaaccggcataa

SEQ ID NO: 150 - DNA, 1350 bp, Unknown
  Unknown gut bacteria
gtggcagaaaaaattccttcgcgccaggagcttgcgcgggaagatacatgggcaattgaggatttatatgagacggacgaggcgtggctttccgatctggaaaagctcaaggcgctcggcgcgcgcctgccgggctatgccgggaagatttccgcagacgcaaagacgctgctggaataccagagactcggagaagagatctcgctgcttctcgacagtcttgcaaactatgcgcagagaaagagcgacgaggacacgagaaaccccgtctatcaggacctgaccggcaagctgaccaaggtctgggtacagctgggcgcggacacggcgtttgaggtgccggagcttttgtccatttcggacgagcggatggaggaattttaccgggaagaaccggagcttcagctctaccggcggcattttgacgtcattcgccgtaaaaaagagcacattctctccgagagtgaggaaaagcttctggcgatggcaggcgagatggcaggcacgccggaggagatatattccctgtttgcagacgccgatctgaccttccgcccggcgctcgaccgggacggaaacgaacaccccatcacgcagggcagctatattgccgcgatggaatcacccgaccggacgctgcggaaaaatgcctttgagagcctgtatgcgggcttcggagcgtataaaaactcggttgccgcgatgctctgcgggcaggtcaagcagctggaatttttctcgaaggcgcgccggtatgcctcgcctctggaagcgtctttggatgcaacggaggttcccgtgggcgtgtatcatgcgctgattgaggcggtgcatcagaatcttgacaagctgcgcaggtatatgcgtctgcgcaagaagctgctcggtgtcgacgagcttcacatgtatgatctttatacgccgctgattgaaacgtcgcagaagagaattccttttgacgaggcgaaaaagaccgtagcgcaggcactcggtgtgatgggcgagcgctacggcgcgattctgcaggagggattccagaaccgctggattgacgtctatgagaacaccggcaagcgctcgggcgcgtattctgcgggcgcgcgcgtgcatccgtatgtgctgctcaactacacgggaacgctggacagcgagtttacactggcacatgagatggggcacgcgattcattcgtacctgtccaacaagacccagccggtcgtttacgcggactatgtgattttcgtggcagaggtcgcgtctacctgcaacgaggcgcttctgatgcagcatctgctctcgaccacaagcgagaaaaaagagcgcgcctatctcatcaatcacttcctcgag

SEQ ID NO: 151 - DNA, 795 bp, Unknown
  Unknown gut bacteria
atgcgccgaaaagcacgcgatatcctgcgggaccagcagggcctttcgatgattctggtgctctgcatcggtgccttgtttgtggccctgtctgcggcactggtgtacgcggcgtccgtgttgacggccaacgccaaccgccagcttttggagcaggaggcctaccagctggccacgagtttttccgacgtgctggaaggggaactgaacacccccacaagctccttcgccgcgttcgtgaatgacagcttcatgacctccacggcctacggcggcgatatctacggcagcccctcgcagccctactcctacacatggaaagcggccgatgccgacacgagcggtgcggaggaaatcaccgtcacgctgcgccgccgcccgggcgaggacgctgaaaagctgaacctgagcggcgtgggccagtccgtcagcaccaaaagcggctggcgcgaccaactgaccagctggcagagcaacgactacctgctgaccgatctgcagctggacgtgaccgtcaccgccaccaaggcgggggagagcttcgcctataccgtgacctatgaccggcaggtacactacccggtgtctggctacacatttgacgatagtacgacggtttacacatggagcaagggcacaaacacctttgccagccccggtttgtcgagtatcaatattaaaccggaggacgcagagcgaatcattgtgccccactttgacaccaccaacccggataagtccaccatccactacacccgcggtgcccgccagagcaccagcacagcacaggagtga

SEQ ID NO: 152 - DNA, 1689 bp, Unknown
  Unknown gut bacteria
tcagtgcggcgcaggcggctgtggggcaaaaaagattccaccgtttacactgcgaatgtggaaaacttcctcacgacccagaaaaccaccgccgccgggatgatgctggtctgcgcggtgttgttcctgcctgcgctggcactgcgcccggtgctggctctgccgctggatgctctgcagccggtgacggagcgcacccgggcggcggcgctgggggcggccatcgagtggctgccaaaaatcagcggcggggcgttgaactttcacgtcagcgcggcggcgggcggcgtcgaggacggcagcctgacccagagcggcggcctggccctgcaagggttggaggatttactcgtcacgaccgacgagaagccgacggagacggtctacctgcgcggttttatcggcgcggaatacgatgggcatagctggcagcctgcggacgccgagcagttcgacaatgccgccgccagctggaaaaccgacggtgacagccgtttggcaatcgcgaacctgccgtttctgcgggctgcctacgatggtgccgcaccgcagcagatgaccgtgcagcggctgcacgccggcgatgcctacacttttgcaccctataacgcctattttaacgactactaccgcctggacggcgacggcgcggcagcaggccagaccgcgcaggacgacacgttctactacttcccgcgcggggaggcaaaaacgctgctgaccgcccgtgccgacgcggatcccagtgtgctggaccggctggaaagcgcctacgcggcctacgccgagagccgctacctggcgacgcccgacggcgcagactacggcacattgcaagaattttgcgatgcagcggaaaaagaacacaaactaaccggcgacgccgacgcgatacgaacctttgtgcgcagctacctgaacgagcactgcacctacaccagtgacccgccccagccagccgaaggggccgacccggtgttgtattttctgagcgagagccatgcgggcagcagcacgcagtttgcgtcggcggcggtggtgctctgccggatgctgggcctgcccgcccgctatgtggtgggctatgccgccccccaaagcctgtttgccgagagtgacggcggctggcaggccgttttgcaggacgataacgcccacgcctgggccgaggtgtaccttgccgggcagggctggaccccgctggaaacgacccccggcatggtcagcgaactgaccgaggaccagctggccgccaacgcgaacgctgtgccgactgccgatgatgccgagaccccgctgcccgccgtgacacccgcgccggaggtggacccgaccgccccgcaggcccgagctttttggtggctgctgccgctggcggcggtgctggccgcgctggccgtgtggggcattgcccgtgcacggcgcaccccggccgatactgtgcgggcggagttccgcgcgctgtacaaaaagatgtgccgctgcggcctgggcgaaggggtatcctctgatcaggaagagtttaaacaatttttatgggaacacaccaaaacggcggccccgcaggatgtggaaacgctgctggcgcttgtgcagacggcgcagtttgcgccggggccggtcagcgcgcaaaccgcgcaacaggtacgcggcttgtgccgcatactgcgcaaaaatttacacaggtaa

SEQ ID NO: 153 - DNA, 1629 bp, Unknown
  Unknown gut bacteria
atgaaacaacaaacaaagggcggggcgctgcacaaggtctggcaggcgctgccgtggctgtggatggcggcagcgtacctgtttgacctgtggtatcagctggtgcccggcaaatggatcgtcgattccgaccttgcctcggaaatgatcctctccgacctgctcaacaaagagggaaccatcatcagccataactggttctactccaccgagctgaaagtcgtcaacctgcaatggttctaccgcctggggctgcggattttccctaatgactggcacctggcccgcacgtttggcatggccatcacgctggcgctgttcgcggcggccatgctctttttcgtcaaatgcgcggggctggggcgcgcgggcctgtggatggtcggtacgctgctgtggcccttcggacagcattacctggtctacgcgatctacggcggctattatctcgtttatacgttcttttatatgctggtactggcgctggtgctgcgcagcctgaacgccgataaaaagcactgcgccctgcaatgggtgctggcttgcgtcatcacggcggtggccggcatgaacggcgtcaagcagctcatggtgttccacgcgccgctctgtctggcagcggccattctgctggtgttggcactgcacagctgcggcaagaccaactggaaggccgccctggacgccagccgcaaagaagttcgtttgtttgcggcgtcgctggtcacggcggtggccgctgcggcgggatacttcgtcagcaacgcggttttgtcccggatgtatgacttcaaatcctataacttcatcgtctggaaccgcgacgaggattggttcaccctcgaccgcatcctgatggacttcttccatgagtttggctacgagaacggctccggtgtgttccacttcggcggcattgcggcggccgtgggcctgctgctgggctgctggatgttcttctgcatcgtgcggctgctgctgcggctggacaagctggaacgcaacgacaagctgctggtgctgctgctcgtcgccatgctggcggtctgcggcgtggcctacacctacttccacgagtattacctctacttctggctcatgaatatgccggtggccatcgccgtgatggcggtggagatcaagaccgaggacttccacatcctgggtgcccggcagctgctgggcgtggggctggcggcctgctttacgctctgcgccgtcagcacggtacgccaggagcaggaacacccctacctggcccacaaggggctgaacaccgccgccgaatggctggtggacaacggctatacccagggctattccacattctggaacggcaacgccatgaccgagttgaccagcggcaagctggaagtctggacgctgcaatcgctggaccgcgacgatgtgcccaactggctgcagcccaagagccatctgaccaccgacccggagcaccccttcctgctcatcgacaccgagacggacggcccggcagagagcgccaagctaatccagtacggtgactgcaccgaggtgtacaacgatggccgctatgtcatctacgatttcgccgatgcggacgccttgcacgcagcggcccaggcggcagcggatgcaaaacaataa

SEQ ID NO: 154 - DNA, 1164 bp, Unknown
  Unknown gut bacteria
atgctcgtcatcgccctgtccctgcacttctacccggaaagcattttcttctatccacagatactataccgcgaaaacacttttgtggcaagtgtaaacttttttggggaatcattgcggttttgtggcacatttgctataataaacacaaattcccgccaaagtgaggtgtcctgcatgaaaaaacatccgttgcttactgcggccgccgcagccggtactgccgtgctcggcgcagcctacggcatctaccgcgtcgccttttaccaaaagcccaccaccgccgtgccctcccccgccgatatgcccacgcgggaggtctaccgcaaggccatgtgccccgacgccgatgcgctggcgcgggacaccttcacgccggtacatatcaccgcgcaggacggcacaccgctggccgcgcgatactaccaccacaacgacggtgccccgctggctatcatcttccacggctaccggggctatgccgtgcgggacggcctgggcggctacaccctctgcaccaagctgggctataatgttctgctgcccgaccagcgcgcccacgggtacagcggcggccacaccattaccatgggcgtgaaggagcgctacgacgcccgggactgggctgtctgggcacgcagccacttcggcccggaagttcccatctttttgatgggcgtctcgatgggcgcagccaccgtgctgctggccgccgggctgaatctgccggacaacgtctgcggcatcgtagccgactgcggctacaccagcccgcgcgagatcacccgcaaatgtctgccggagtacctccccggcttccctctcggccccacctacgccatcgggcggctgggggccatcctgttcggccattttgaccctgaggatgccgactgcaccgatgccgcggcccacagcaaagtgccgatcttcttcgtccacggcgatgccgacggctttgttccctacgagatgggccgccgcaactacgaggtctgccgcgccaagggcaagcgctttttgacggtgcacggtgccgagcacgccgtcagctactaccacgacaacaccgcctacacgaaagaatgcaccgacttcctgcaagactgcctcacccgccgccacttcgcctggccgaaggaagcctccgacgacgcgcgataa

SEQ ID NO: 155 - DNA, 1449 bp, Unknown
  Unknown gut bacteria
atgactgaactgatccaaagcctgaaggcggcggtggcgcggtatccgggcacgatggcggaactggcgcgccgggcggccatcgaccgctctactttatataagatactcggcgggcagcgcacgcctcggcgcgaacagctggagcgcctgaccgacgcactggaattgaccgaggaagaaaaaaccaccctgctggtgcagtacaagcagcgtggccgcggcacggaccccaagatgcgcgctgcgttgaaccaactgctggaagcggcgttccgggtcgaggattacacccggcgcgagggaaacatcaccaacgaggccgcgcggcagatgagcgttgcaggacagtatgtggagggtacccgcgcggtgacggctgccgcagcggcgctggtggccgagcatatgctatccggtgatacgcggccgctgctgctctcgccattcacgaatccggtgctggaccgggtgctggtgaaccgcttttctgcgccagacgggcagacggcgtcgctgtcccagctgctgatttttgtcgaggaaagcgatatcccccgggagaaagccgggaatatcgccacgctgacccgcgcgttgccgctcttgtttctgcccaagctcaactacgatgcccgcgttgtacggtgtgtgacgagcgaacccagccccggtacgctgatgccggtgtatctgctgctgcccacggccgccttgatgatggaccgcttggggcagaaaggatatatcatcaccgaccgggaggtcgtggaaaatctgcgcctgtcgttcagccgaaagtacatcgacgcagtgccggtgctgaaactggcgaccgggacccacggttttatggagtccatgcagttgtacagcaagctgtttgccgagacgcgcaagtgctgcatggtgcgctaccagccgccgttcagcctgtttgccgatgaaaagatcgcgctgcgggtcgtgcggcaggacgcagccgtgcagccctacctgcccgcgctgctggattacctgaacacctggaaccagcagacgccggatctgtatttctgcgaggaaggacttttgcagtttgtgcgcaccgggcagatgtttgacctgccctcggctctgtacgaaccgccggacgtcgagacgcgccgggagctgctgctgcggctgcgccgggcggcggcctccgacaagcagacgctgcgcattgtggaatcggcccagctgccgctgacaccgtcgatgagcgtgaacgctttccgcgggcgcggggtggtgttctgccaggctgtgctggaaccgggcaaaatgtactgccgcgaatatctgatggaggatccccagatgaccgaggcagtgctgaattatctggaggagggcaaaaccggcgaccgggtgcgcagccaaaaatatacggtggattttattgattattgcctgcggttgttgtaa

SEQ ID NO: 156 - DNA, 1503 bp, Unknown
  Unknown gut bacteria
atgtttaataaaaagaatcccatgcggtatttctccggcagcacgtttgcgcggctgccactgtataagctggcggcgggcggcacggctgtcgcgctgacggccagcatcggcctgggcgcgttcgcggcgggcgttacgccgttcaacctgcccacggccaccccggccccggtcgtgaccgccacaccggaaacggcagccacgcccacgccgtcgccgtcccccacgcccagccctacgccggtgccggaccgcaccctgaccatggaggccaccgtcgtgcagcaggacgtcggcgtgacgctctacgtggacccgctgcccgaagccacagcaacgccggaacccacggctctgccgtctgcgtcgcccaaggctggcgcgtcggcggcgtccggggctaaacccacggccacgccaaaggcgaccgccaccccgaccccgacgcctaccgctgctccgaccaaggacgacgagcaggaaaagacacctctgctgggcgttgagggcaccatcaccctgaccgccgccaagggcaacgccaccgactacgcgcttgaccccgagaccggcaccgccctggccgaggacgtggaacccggcgactacacgctggccctgcagcccatcgaaggctacaccacccccgaagcccagaccgtaactgtgaaggaaaaggtcgtctacaaggcggatgtacaggctggcaaggaaaagatcgttcaggcaagccaggtcaacgagagtgccgaggactccggcgtcagcaacgcaggttccgcgcccatcgtcgaggaagtgactgacacggttacctatgccgagagcgacaagaccgagaccggcaccaaaactacttacacggccaagttgagcagcagcggccacctgctgctggccgacggcaccgagaccccctatctgcccgtctaccaggacggcacgcgggatctgatcggcgcgacccgcgacccgaactacgcggccaacacgaacacttctgcctggctgcccggcgcagcggattccattcagctgctgggcgcggccaacacccgcatggcgtgggcacaccgcgccgatgaacccgccgtgcaggagggggatgaggcggcctccatcgccgaggagacgcccgctcccaccgaggctcccactccggaaccgacggcagagcctactgccgagcccaccgcagagccgacggcagaaccaaccgccgagcctacaccggaagtgacggcgaagcccgaaccgacggtcgcccccacgaacaccccggccccgaccgaggcccccaccgccacgccggatcccacggcgggctggcctgacaatatcgaggccaaggatctggcgagctacggttttgacgtgaccagttccgacgacaccgtgtaccagtacaccggatggcaggaaattgacggcgtgacgtactattatgacccgacgacccaccagcccgtcaccggacagcaggtcatccagggcgacgtt

SEQ ID NO: 157 - DNA, 783 bp, Unknown
  Unknown gut bacteria
gtgccgaaattgatatttgacccagaaatttactgcaatgctgccgagaacgccgagctggacggcagtacccccctgaccctgaccgggaacggcctgtgggtgggggtactctcccgcggggaatgcctgctggacggctttgaccgcccaggccagagcggcgatatcctgctggggcctgctcccctgacgctgacgccccaaacggactgccacctgctggctgtgcggctgaccggccactgcacggacgcctacctattacagttgggtgcggcccgctgggctgacggcgcggcctgccccggcgcggccgagttgattgcccagctgcacggcatccacacggcggcgatggcctatgcgctgctctgcgccgtgggcaaggctgacgagacggcccgtcccctgcccccgctggtggccgaggctgtggcggccatccggcagaactacatggccctctacggcgtggaggaactgagcgagcagctcggcgtgacgaagagccatctggtgcgggtgttcaagcaggaaatcggtatcccacccggaaagtacatgacgaatgtgcgcatcgaggccgtgaaggcgctgctgctcagcgatgagtataacctggatatgattgcgggcctgaccgggttttccggcgcaaactacctctgccgcgtgttcaagcgggaggtgggcctctcccctgccgcctggcgtgccgccgctgcgccgctgcccgccgtgcccaaactgccgccgcgcagtcaggaaatgtatgtgtaa

SEQ ID NO: 158 - DNA, 1224 bp, Unknown
  Unknown gut bacteria
ttggcacaaaacaagaaacagcggctgctgtggggcctggggctgttgggcacagcggtctttaccctgctgatgggctggctgcactaccaacagctgctctccaccgggtactattactctgatatcccggcccacatggcgggccatgccatgggcaataccggcttttcgctggtcacggtcctgctgcagggcgtgttcgccatcggcggcaacctgggcacggcggtgtttttggctgtcgtcaacctgctgacgctgctgatatttgcctgggccatccgtaaggctgtgccgcaggtctgccctggcgcagcgctgctctggtcgctggctgcaaacctctgtcaggcggtctggatgccaaacggcggctactggtactttggtgccatcaccggcacgatctaccacaacactacctacattatgctgcaaccgttggcgcttatcgcgtttttcctcttcctctcgctggcagagcaccatggtcagctgcaatggcgcagttgggccgcgttggcggtgctgcttacggtggcaacggctatcaagcccagctaccttttcgcctttgccccagccctgcttgtggcgctggtcgttgacctgatccgcacccacggcaaggccctccaatgggaagtctggctcggctgtacggtgctgccgggcattctgctctgcatcattcaagctaaggtgctgttcaccggcggggatgattccggcatggcactgatcttcaccaccgacttcgaccccgaaaaagtgctgtggggtgtctttaattacagcgccaagcacggcctggtgcgctcactggtgttcgtgggtgcggtggttttgctgctgttccggcagtggcgcggcgcttacgcctataagttcagcctgcttctgtttgccatctcgctggccgagggcatctgcctgaccgagaccggcagccgtatgtacgacggcaacctgtggtggggcgcgttcatctgctatgacatcctgctgctggaatcgctgattcagctgctgcgccgcctgcataaaaagccgcgcaccccggtggagaccggcacgtcggttttgtgctgcggggcgctggcctggcatattgccagcggcattgtgttcctggggctgatgctggccggtatctcctatgcggtcatgatcggcaccgaaagctacctgctgcaagaaatgtggggcattgtactgtga

SEQ ID NO: 159 - DNA, 1602 bp, Unknown
  Unknown gut bacteria
atgtctctgcggcggttttatgggctttgcggggcgttggtttttctggcgggggtcgtgctctgccgcacctactgggtggggcagcaggccgcctatgccgccagcgcaggcggccagaccgtccagacactggacttgccccgggccaggggcgatttctacgaccgcaacggccgcaaactgactggcacgcaaacgcagtattacgcgctctgcatccccggcgacgatggctacacggcgctgtttccctatgtttcctacgaaaagcagggcgtgctttacgaccgccgtaacctggccgcgccgttcctgattgaagtcagccgcgacctgaccgggcggggcatcgccacctgcgcggtgcctgcgcatacggtggatattgcgccgcatctgctgggctacctcgacggcgaaggccgcggcgtcgccgggctggaacgcgcctacgacgcgctgctgacggcctccggcgataagcgcaccgtcagctgcgtgctggcggcgcacagcggcctgatggcggggacaagccctgtatgggctacgaggaaagaaggcactgggcagggcgtgcagctgacactggacgccgacttgcagcgcgcctgtgaggcgctggcggcgcagcttatgccgcgggggtgcatcctcattatggacgctgctacaggcgaggtgcttgccagcgtcagtgcgccgacgtttgacgcacaggatgtggccgccagcatccgcgccgacgatacttcgctcatcaaccgcccatttgctgcgttcagcgctggatcggtgtttaaagtggtgctggccgcagctgcctatgaacagggcttggactggttcacccacgactgcaccggtgaaatcgtggtggcggggcagacctaccgctgcgcccaaggccgcgcccacggcgaagtcaacctgcgcggtgcgctggaagaaagctgcaacacctattttatcaaactgggccagctgttgggggcagaagccatccgggaagaggcagaacacttcggctttggcacagcggtacaaattgccccgggcctggccgcagctgccggtacgctgccggacgcggagacgctggaaaaccccggccagttggcaacgttcagctttgggcaggggtcgctgaccgtgacgccgctgcaaatcaccgccatgatgaacactgttgccaacggcggggtgtataggacacctggctttgtgcagggcatcaccggggccgatggtatgttgaccgacccggcggcagcggagagcgccccgcgtaccgtctgtgacgccgccacggcccgggtgctgcgcagtatgctggcctcggtggtgacggatggcattggccatgacgcccagccacgccatggtacagcgggcggcaagactggcacggcccagaccggccagtacaacgccgacggtgaggagctgttgaactattggttcaccggcttttacccggctgatgcgccccaatataccatcacggtcatgcaggacggtatcttgaagcccgaaacctccagcgccgccctgtttgagcgaataacggaaattctggatgtgtgggcggggtactaa

SEQ ID NO: 160 - DNA, 822 bp, Unknown
  Unknown gut bacteria
atggcggtactgttgcatgaacggccgcagacggccggcggaaaaacgcgcaagaccccgaacctgcccaaaacctctgctgtggtggcgctgttcgcctttagctcccggctggaccgggatacgatgagcctgtttgccaagacccacagcgatgaagtccgcgcggcggccattgcggccaccgggcaggaggtgctggaactgctgcacggcgggctgcgccccaacgtattggtgctggacgcgctgctgaccaagcccggcgtgaccgaggtcttgcaggaaatcggcacgatgcagcttgacccggaaccagcggttctggtgctggttcctgtgccggaggaaaccgccgcccgcaaggcattgcggctgttctcccagtaccagatcatgctgcgcccttacggcatgaaaaatctctttgatgaggtctaccgcatgggcacgaacgaggatgagcaccagctgtactacctgcgccagtgctgcgacgatgtgctggatgcctacggcgcgcccgaaacgctgagcggctaccgctatgccgagcggatgctgctgtacgccctgtacgcggacaaaccgcagcagatcggcagcctgcagcaatacgtggctgcggaggaaggcatcgagatcggcaccgtgacttcggcgctgaatcgtatgtcggcagccatggcaaagcggggcgaagaaccttaccggacgttatgcctgcgcagcggccgcccggcggacggtgtactctccaatgggcagctgttcaaagggctgctgaaagatttgcgggataagacggaacagtacttataa

SEQ ID NO: 161 - DNA, 846 bp, Unknown
  Unknown gut bacteria
atgtcagttttgctgattccgaaccccaccaaggacgcagggcttgccgttacgcggcaggctgctgctgtgctggccgggttgggcgtacaggtgttgatgccgcagaccttcgcgggtgagggcaggcttgccggggtacagtttttgccggaggctgacgcctatcgcgcggcggaccaggtcgtgaccatcggcggcgacggaacgttgctgcgggccggactctcctgtatgcggcacggcaagccggttctgggtgtgaacctgggccgcatgggctttctggccacctgcgaggtcgccgaactgcccacaaaattgcagcgcttggcagcggaggagttcaccctcgtgaatcgcgggctgctccacgccgaggtccccgcccacggctggcgggccgatgccatcaatgatatcgttctgttcggccagacgcggctgcacccgatggattataaagtgtactgcgacggcgcgtttgtgggcagctaccgcagcgacggcatgatactggcaacgccaaccggctccaccgcgtattcgttttccgcaggcgggccgatcttggatgtttccgcagatgtgatggtcttaacaccggtctgcgcccacaatgtttacgtggcaccgcttgtttttgccgccagccgtcggcttgaaatcattgccgacgccgagaaccgcgacggcagctttgcctgcgcggacagcagcgaccaatgtgacctgctccccggtgagcgcctgtgcataacgggcggcgggcagggcttacagctgattgcctttgacgacgcggagcagttccacgccatagagaacaaattgatgaggagatga

SEQ ID NO: 162 - DNA, 1368 bp, Unknown
  Unknown gut bacteria
atgaaactgcaaaaactgacggaaaaacgatggttctggccgctggtctgcgctgtgtcggtcgtgttcggctggtggtatctcagcatcgtgacctgtgcgcccctgggcggcgacgatgaactcatcaacctgcaaaactactattatattacccacacatcctttgggcaaagcgtgctggattatatcggcgacctgtggacccagttcagcttgcagcaggggcggttccggcccttctcctcgccgccggtgcgcgggctgacgagctggtttttgggtgatctggtgggctatcggctctacatcctggcctggacctacacggatatcctgctgaccggctggctcgtgggcaaggccagccacaacaaaaagctgggcatcgcctgtatctgcctgctgcccatgatgttcagtgtctggcaggactccaccggcaacagcctgtattcctacggcgcgctggtgcaaagtacgctgctgcccgcactggtggcagggctggctgtgctgcgtttgcaggataccgggcacaagcggtgggccgtgttggcggggtactgcgcgttccagtgctgcgccacgtttgaaattggttttacctatattgtgccgattttcggcctggcctggctctacaccgacaaggcccgcgacgccctgcggctgagcattccggtgtttgtgggcgagtgcgtgacgctggccttcaacctgggggcgcggctcgtcaacaccttgcaggagatgggcattctggccggggatgcccagccaatcggcggtgtatcgccgaactttgacatcccggcggtgctcaagacctgggccatgcagatgtcggcgggcttcccgctcaatgcactgttcgcgggcaaggtccgccccggcacgatctacccggtggatatcctctgcggcgtcatggtggccggggctgcggtggcggcgctgactgccctgcacgagctgccaaaccgcaagcaaaacctgctgctgttcttgaccggccttgccatgctgtccgcaccgtcgctgctcatcgggctttcgcctaaatatcagcaggcggggcagatcgattggcggcacggctacatcccgcagacggtggaaagctacggcgttggcctgatggccctggcgctgctggtgctgctgctgcgctgggcacggagcaaaacctggtggcccaagaaccgcgcggtgctctactgcctgctggctgtcggcatggcgggcacggtggtctggcagcgcgccgcgacccgctcagcctacgccgagggtggccgcgcctacacggtctttggcgagacggtagccgccgggggggccggggccgccgggggcgcgggggtg

SEQ ID NO: 163 - DNA, 1305 bp, Unknown
  Unknown gut bacteria
ttgaagaaacatatcatcaaaatcgccgcttttctcgtcggctttttgcttatcaatctgcttttgtgcggctttatgccgccggataacggttccagccttgccatgtggcgcaactatcacagcaaagattccggcgatatcgccgtcattggctcgtcgctggcctcctgcgctttgccggaggaagaactggccgccgccactggcaaatccgtggcgctgatggcaaccaactcccaaagctgggatatgtccaaaattgcactggaatccgtgctgcgggaacatacaccgcagtatgtcatcctggtcatggacctgtacaatatgacgggggagccataccccaaggcgcaaaaggcttttctctctgccgagttgcagacttcccgctggcaggaccgccccgccgaactgctgcgttacatgaccagcgccgagcgctttaccgacgcggattcgctgaacgcgctgttcccctggcagggcggcaactggcccaccgattggcccgccaccatccggcaaaagtggaacgccctgactgcccgcattgctgcgcgcggcgcggcacacggccagccggaaggggataccgtcatcgattttgacacgatcggcaatgtgaatacctggaaccagacgaaccacccattcacccagcagcacattgacgagcttgtctcgatgatgcagctctgccaagagaaaggcgtgccgctgctcgtcatcagcgccccaaaaacgacgctggacgtcatcagctacgatacttattttgacgattacgcctttttcaaaaagctggcagggctttacggcgcatcttactatgacttcaactttgccaaacaggagctgttcgcgaacgttgaaccggattactacaaggatttcacccacatgaacactaccggcggccacggtttcagccagtgcatggcaaagttcctggccctgctggacgagggagctgacgtggatgccctgtttgagacgccggaagaatacctggccgccgtcaactatatcacaaatgtgtacctgacgccggagattcaaacggacaaaattctgctgctggcgggttcctaccacggaccctcagtcgaggctgagtatgagttctgggtcaaagcccccggtgagacggaatacgcaaaaatttccgattacgacacccgtacctgggtcgaataccccacaacagtacacggtagctatcagttccgcgtcaatgcgcgggtagtcgggtctgatgcagattttgagcgttattacgaatgttatcttgatttttaa

SEQ ID NO: 164 - DNA, 1776 bp, Unknown
  Unknown gut bacteria
atgacacacagaaaacgtacttctatcttattggtgatttcattcgtattgattttggttggcagtttcttttctaacgcaatcaacacggattttggaaaaattaaaacagatcgcctctatctgatgaatgacaatggttatacggtaagtgcaagaatttatatccccaaaacggcaacgcaggaggcacctgccccggccatgattatctgccccggtggtgacagcccgtccgatttgcttactccctgggccagtgagattgcacgccgtggctttgtggtagcactggtggactataccggctgtggcgatacggaagttgataatgcttcgcagtattggacgaaccacggtgctatggagctggaaacagtctacgactatctggcaaatcggccattcgtagacgcaacccagattggcgtgggcggacattccatgggttcgctttacagctattgcctgtcaaccaaacgtcaggtttccctggtcatttctgatgttatttacagcgaggctatgcccacctacaacctggactttgtacagatctccgggcagcatgatgaaggtctgttggcgcgcgtcaataagattgatgaattgtttaaagatccgttcctgacagaactgttcggcacggatgagatcgaacccaacaaactgtatggctcgtgggaagaccacaatgcacgcatcttctatgtggtcaaccagacgcatgcagatgatatgtactgggggcagtttgtccgcctggtagtggactccgccatgaacagcatggaagcacctaatccgcttcctgtaagcaatatgatctacggctggaactttgtggcgctgtttgttgtgatcattggcatcgttatgatgttgttctgcgtggcagatctgttgctggattctgacctgttctcgtccctgaagctgcctgccccgcaggttacagcaggatttgcctttaagtcaaagggctggtggatctgcgctgctattctggcactgattccggtactgttcttcttccccggtacagcggtcggcaaccagatggcttctaataaactgttccagctgggtactacccccaatggctttctgatctggagcctgttcgcggcttgcggcatgctggtattcttccttgcgtaccactttatgtatggcaaaaagaaaggctgcaatgtttccagctacggccttgccacaggtagtgataccaaagtacacattggttatattgtaaaatctgccgtctttgcactgatcctgtttatgctgggatactttgtcctgatgttgatctatcgctatgcggatacagatgttcacggcctcagtatcagcttccgtctgctgaatgacgccaaatgtgcaacgatgccttggtattgccttggtatgctgccatacttcctgctggttacgcttgcaggcaatactttacagttccgcggagatgtcagcaaaggtaaggatatgaccaagtcggttattttgggcgcctgcattggcatggtgggtatgctgctgctcttcatcttctatgaagtaacgctgcgtctgaaccgcccgttctacacaggtcattttgcacacttctacatgctgctcctttctaatgtgctgctgcagttctgcgtggcttccggtctggcaatttttatccgcagaaagaccaacagcatctggcctggtgtatttattggtacggcactggttgcatttggcatggttagctccaacagtattgccatgattatctga

SEQ ID NO: 165 - DNA, 1179 bp, Unknown
  Unknown gut bacteria
ttgaaagacgaacatatctggtccaaaaagccagagacgatattggattggttctgcgtggtcggggcctgtatcgcattttatctgattttaaacaacctcgggtatttcctgggcaaaatcggcttctttatcgggattctgtcgccgtttgcgggcggcgtggtcattgcctacatcctggatccgatggtaaaattcttttaccacaagctgttcaaggaaaaaaacaagacacgcggcattgctattctgatggcctatgccgtggcgatcctgttgatcgtgctgctggcatggctggtcatcccgcagatcgtgaacagtatcgtcatgctgtttacgaacttccccagctacatacagggcgtgcaggatctactggtcatgatgcaggatcgctacggcatcgacttgcagcaggctatcaaaatgctggacgattctgagaccatggtcaaggaagtgtacagcctggcgaccgccgccatgccgcagatcgtggacagcatcggcagcgtggcgtccaactttgtgggcatctttacttcggtggcggccagtatctatatgttggcggataaagagcatctgctccaccagctgcgcacgctgacccacgcctttttgccggagaaagcggctgacaacacgctgcgcatctgccattacgccaacgtgaactttaccgggttcttcgtcggcaagatcatcgactcggccatcatcggcgtcatcacctttgtggcaatgacgatcctgcggctggactttgcactgctcatcagtgtgtttatcggcatcacgaacatcatcccggtgttcggccccttcatcggcgcaattcccagcatctttatcctgctgctggtcgaccccatccaggcggttattttcggtgtgctcatccttgtcatccagcagctggacggcaacttcatcggcccgaagatcttaggctcgtccatcggtatttctgccctgtggattttgttctccatcgtggtgggcggcgatttgttcggcatcgtcggtatggtcgtcggtgtgccggtgttcgccacgctctacggcctggcccaggagttcgtgcattacacgctggataagcgaggcatcgacgctgagggcaacccaagggaacaaacggccgaggataaggaaaacgtgtttgagtaa

SEQ ID NO: 166 - DNA, 2811 bp, Unknown
  Unknown gut bacteria
atggcggcaagcacggccagcacagtgttcgcggcggacgatctgcccgccctgaccgagccgcccgccgtggctgccccggctgaccctgacccgcctgcggcggaagaagtcgtggtcgagaccgaagtgcccgaccccacggcggaaccggctccggaaacaaccgaaaccccgccggactctgctgccgagccgaccccggaacccatgcccaccgaggcccctgccccggagccgacagccgagacaacacccgagccgacggcggaacctgcccccgaaccgacggaaccgcccatcccggaccccactgccgcgccaacccaggccccggctggcccggagccgacggcggccccaacgccgcagcctaccgctgcgccgctgcctaccgtgccccccgcgcccacggccagcccggtttcacagcagactgcggaggagacgaaatatgccgccgtgctggcagcgcctataccagagccgacggccgtgccccttgtagtggacacgctggaagtagaggacaccatcagcacagacggctgctttaccgctgtcgtcaacggcagcgcggagcgccaggacgtgacctacacctggtaccgcagccacgatggccagaactgggagcaggtcacgccgcgcatctgcaccggcagcgagtggaacatcaccgagggcagcgagcacaagctgaacgccgccatcgattcctgcatcgccaatgtcggccctaccgagcggctgtattacaaagtggaagtcaccggcttcaacggtactaaggcggccgaagcccgtgtgccctaccatttgcagctgcaaaacggaagctttgaaagcccgagcctgcacagcatggcggtggagcatacccggaccggcgtgctttcctatgcaccggaggacaaagagcagaccataaaaagccattttgcccagctggcggacaccacacaggggcttgtttggcacacgacaggcctgtactaccactggacggacgaggatgaaacacgcgccgataaaacccagtgggccaactacatagaaattgtagacggaaccaaccacagctataatgacgacttagaaaacaacgaccccagggtcagctacaacacccgcagcgcccaggacggcaatcagttcgccgagctgaactgcgaagcctacggtgcgctctatcaggatgtgctgaccgtgcccggctccacgctgaactggtcgctggcccacaagggccgcaacggcgcggacacgatggtgctgctgatcgcgccggtcacggtggccgaagcaatcaccaaaacgctgactgccgccgcccagaacgaggctaaagacagtgtgcgcaatgccctgaacgatctggtcgagtacaacggtcagaaggtgcccatcagcacttttatggtcggcggcgaaatgaccgatggcgtcgccaactgggcaacacacaagggcacataccaggtccctggcgggcagtatgtgagccgcttctttttcctggcggtgcaaacccaggacgacaagcgcaccgagggcaatctgctggacaacgtctggttcagcaccgaccctgccccggcggtggcgggccgcgcaaatctgaccatccgcaaaaccataacgggcggcctgactgccgaggagctgaccgccgcgcgggcaaacctgacgttcaccgtggcgaaccagaacggtacggtcgcgacgatccacggtgcggatatgaccgtagacagtgctgaccccacccgcagccgctataccctgaccgacctgccgctgaccagcgacgacggcagcgtaaactacacctacaccgtggaagagactggccacgatgccccggcgggcctgctctacctgggcacccaggcggcggtgaacggtgacaatgagcagacaggcacaagcctggcggacattacgctgaccacaagcgccgacacgaccgcagagttccgcaacatctacgcccgccccaccggcagcctgcacctgaccaaggctgtggccgacgaggcgcagcaagcggaagccgacgcagtgacgaacaccttcacggtcagcagcctgcccatcggcagctatacactgcaatttgatgatggtacgaccgaaacgcgggaactaacggcgggcggcgcgctgaccattgcgctgaagggcctcaccggcgtgacgctgaaagacatcccggtcaaccgctataccgtgaccgagacggcccaccccgacctggcaaactactactgcacgaccaccgccgacgatgccgcggccgaagtgcaggtcatgtccggccagacggcagaagtgaccatcacgaacagctatgcgccgttcctgacgctgaccatcaccaagcaggtgacaggcggtctgggcgacgcccgccgtgagtttcccttcacggccacggtcgccggccaggccatcaccgccgccagcgcctatgtgacgaaaggggaaggcgcggccctgaccgggagcggcttcacgctgcgccaccggggcagcatcaccatcggccacctgcgcccgggggatgccttcaccgtgaccgaaaccgacaacaccggttatgagacgagcttcgaccttgatggcagcgtcgaggtcggcaccagcggcgggggaaccctgggcgcacagagcgccacgcttacctgtgtcaacaacaaggacggcgcaccgcccacgggatttggcccggacacggccccggcagtttggatgctgctctgcgccctgctgggcttggtctgcctgcgccgccgcaagggggcgtga

SEQ ID NO: 167 - DNA, 1704 bp, Unknown
  Unknown gut bacteria
atgaagaatttacacaaaaagcaacttcgcctgtcccgccggggcttctggctggtctgcgccctgctggcctgcctgcgcctggcgctgacgagctttcagcaggcgtacacctgggtgggcggcgccccgctggacgatgaactgatgttccacgcggcgcagaatatcacggcgggggagtggctgggcgcgtatgactacctgacgctgtccaaggccatgttcttcccggtgtggctggccctgctgcacgcactgcacctgccgtatctggtcgcgggcgcggcgctctggtgcggcgcggcgctgctggcagcgtttgcattttcgccgctgtggcgaaaaaaacggcccgagcagggccgtgtgctgacgctggcgctgtttgcggcgctggcgtttctgccgtcgtcctgggcggcttacacgctgcgcgtttaccgcgacaacatcttcccggcactctgcctgtacttttttgcgggcatggccgggatggcactgcgggccgtctttgaaaaagacaagccgctctggccctggctggcagcggcgggcgcgggccggccctgcggctacctcgaccgcgaggatgccgggctgttcctgttgccctttgccgcggcggccaccgtcattgtggcgttggtgctggtgggcaagcgccgctggaaagcctttgccgcgcaggtcatcccctacgccatgctcggcgtcggtgtgctgaccttctgcaccctcaactacacccactacggcgtgtttgccctgtcggatttctccgagggctcgtttgccgccgccatgggcgcgatgatgcgcgttgacacggacagcgacaaaccgtacctgtctgtgcccgctgacgcacgcgaaaaaatctacgaagctgtgccggaactgaaacccgtcgcctactggttggaagaggacgcccagatggagaacgacttccgcgacccaggccttgacgactaccgcgcgggcagcttctattgggccatccgccgcgccgcccagtatgagggcatctacgcagacgcccagaccgcagccaactattggcagaccgtggcggacaagatcaacgccgcctgcgacgcgggcaccctgcccagccgcaccggcaaacgggtcgccaccagccaacccatcacggcggcctatgtgcccgccacgctggccgagacctggaacggcttccggcacgtgctgggcttccgcgactgtgcgccctacgaggcgctgcggtcgattggaaccgacgacgacattgcggcatggtccggctacctgcactgcggcttcaacgctgccgccaacgcgggggaggacacgccctattacagcccctaccagcgtgcgattttcgccgttatgcaggggtgggcttgggtgtacggcgtggtgctgacggtctgcgtgttctgcgcggtggtgttccagcttatgaagcttttatcgtgtctgcgcaaaaaatgcacggcggagaccgttgtgccctggctgctgctgttcggcatcttcggtattgcgctgctgcgctgcgccatgatcgcctttgtcgaggtgtccagcttcggcatcggcaccagcaccatgtacctggctccggtacacccgctgctggttctctacgtatttgccgggctgtttttgtatggacggcctatatctgttaaaagaaaggacaacgcatga

SEQ ID NO: 168 - DNA, 1140 bp, Unknown
  Unknown gut bacteria
atgcgttccattaaaaccaagctgttcagccttgccatggctgtttccatggtgctggcgctggctggctgcgccatgtccacgccgtccaccgtcggctccatcggcgggatcgagattccggccggtatctacctgctggcccagtacaactcctacaacacctccgccaacgcggcagagcttgccaccggcgagactgcctccgacgtcaaggccgtgctgaaggccacctgcaccggcaccatcggtgatgaggaagtcactgccaccggcagtgagtatgttgccaagctgaccgaccgcgccatttcctactacgccgaggtcgagcgccgctttaccgagatgaacggcgtgctggatgacgccgctaccgccgaggccgccgacactgccgacaacctgtggtccaccaacggcgacctgtataccgccaatggcatttccaagacgagtctgcagacctacctgctcaacgcccagaaggccaaggctctgctgaagatgacctacggccccgacggtacgacgcctgtggccgaggacgagtacaccgacttcgtcaacaacgactgctactacatcgaggctgtgcagttcccgctggtggattactccacctactcgatggccgatgacgaccagaaggccgccatcatggccaccgccgaaagctgcatggccgaattgaacacgaccgccaccgccgagaccgccagcaacagcgccctgtacaccgccgccatgacctatgtgccgcaggcgatggccgccatgggcagcagtctggacgccagccaggccgtttactacgcagcttcccagctgtacacgccggacgacctgagcagctacggcagcgacgagtacaacaacctgaccgacccgctggacgaggccgggctgaaccactggaccaccatcaacctgggcacgacgattttggttgcccgtaagattgatccgttcaagacctacaccgtggacgagctgaacagtatgtacgacctgttgagcagcatgaagtccaccgacgtccagagcgagctgtacgccgccggtgccgcactggagcataacctgaacagttctgccctgaacacatacagcgcatccaagattaaaaagaacgtttga

SEQ ID NO: 169 - DNA, 2463 bp, Unknown
  Unknown gut bacteria
atgaaaacccgcacgctcttctgcgtgacgctctttatcgtcggcgcattcggtctgctgatttatcagctctacgccctgcagctgcgtgatgccgaactctaccgcaccgaggccgtgacccagcagctgaaggatacgacgctgcctgcgctgcgcggctcgatttacagcgtcaacggcaagctgcttgccaagagcagcacggtatggaatatcgttgcagacccttcctctatcgccaagagcggcgcgtcggagagccagctgcgcacggcggcggaaaacattgccgcactgctgggcggggacaccactgcggataccgtctatgaggttctgaccgctaaaaacagcagcggcgagccgtatcagtaccgtatgctcgccaagggcgtggataagccggtggtggactccatcctgaactatgccgatgagtaccgcatggatcccgaggacggcgccacgaccggcaaacgtattttgtacttttcgaccgaacaggccacgacccgcagctacccctacggcgagttcctctcctcggtgctgggcttctgcaacagcgatggcgagggcgcttacggcctggaaaaatactacgatgaaaccctggcaggcacgccgggtcgcagtgtggccgagacggatgtctacggcaacgccctggccgccgggcaggccgatgtgcacgaggctatcgacggcaacaacctgttcctgaccatcgacgaaaatgtgcagtccatcgtcgaagaatacctgaccgaggcgatgaacaccttcacggtgcatggccgcggcagcgcaatcgtcatgaacgtcaagaccggcgcgattttggctatggcgtccatcgagcagtttgaccccaacgatccgtataaaatcaccgacaccaaaatgaccgacattttgggaaaagaggaaatcgacgccaacgatattgattggctggaaggccgcctgggcgaaaaagccgtggccgatatcgtggccgacggcaagatcagccgcgaaaaaaccatcggcgaggacggcaaggaggtcgccagcgagtacacccaattacagggtatgatgcgcgaggcccagtggaagaataaaaacatcaccgagctgtatatgcccggctctgtctttaagctcatcaccgcatcggcgggactggactccggcgtcatgagcacgagccagaccttctactgcggcggcagcctgaccgtcaatgagggcagcgaactgtgggagcacacctaccgctgcgccaacggcgaggttcaccgtatgcaggacatggcgggtgcgctgaacaacagctgcaacctctggttcatccaggctgccgagacactgaaaccgcagattttctacgactatatccaggcgtttggcttcacgcagcccaccggtatcgacctgcccaacgagacccgctggaccagcgtctacaatgccgagcagatggccgaggtcgatacgaacctctacaccgccgctttcggtcagaacgaatccatcacccccatgcagatggcaaccgctgtggcggccatcgccaacggcggctaccttgtcacgccctatgtggtggactccatcacagacaacgacggcaacgttgtctcccagaccgagacaaacatccgccgccaggtcatttcagaggacgtcagccgccagctgcttgccatgatggaaaataacgtctacggggaaggggactaccattcctgcatcaacgcctatgtggcgggctaccgcatcggcggcaagtccggcacggcagagcgcaccgaccgccacctgcgcggcgacggcgactactacaaggccatgagctttgccgctgtgctgcccatcgacgaccccgaaatcgaggtgttcgtcctgctggacgacccgcgctgggtcaaggactacgccagccaggtcgtggccccggtcgtgggcaacatcatcagcgaggtcgcgccctacctgggcattgagcaggaccccggctacaaccccagcggcaccgtcaaggtgcaaacctgcctggattatacctggaccaacgcccaggttacactgaaccgccagggcctcaagcacaagctcatcggccccagcagcggcaatatcgtctaccagtacccggtgggcggcagcgatgtccccgcaggctccaccgtctacctgtacaccgccaccgaccagaactcgatgaccaccgtgcccgatgtggcgggcaagaccggcacctttgccgagcagatgctgaaagccgccaacctgaacgtgcagttcagcggcgacagcggcggtaaggttgtcagccagagcgtggaggccggcaccagcgccgcctacggcacaatcatcaccctgaccatggacagcggggaagacacccccgccgaaactacccccgccgccgaggaagaaaccatcgacccggcgaatgtggaagggtga

SEQ ID NO: 170 - DNA, 927 bp, Unknown
  Unknown gut bacteria
atgcacgttacacatcgcaaacgctttgtcagccgtgaccttgttgcgctggcggcccgccatccgcaggagctgactgctttgagcgaacagcactaccatgaccagatcgaggcaatcgccggggaagtcctggccgcaggacagcgtatcgtcatgctgaccgggccgtccgccgcgggcaaaacgacttccgcccacaaaattgccgacgccattgcagcccggggccaccacagccaggtcgtcagccttgatgacttctacatcggcgaggggcgttaccccaagaaccccgacggcagcgacgactatgaaagcttgcaggcgctggatttagaaaagctccacacctgcctgaaagacctgtacaagaccggcgtatgtgacgcacctgtgttcgattttactgtgcagcagcccaccggcacccggcgcatcgacgcgcgggacggcgtggtcatcatcgagggcctgcatgccttgaaccccgtgctgaccgagcagctgcccgatgacgcagcactctgcctgtacgcgggtctgcgggaagaatacgccgacgagcgcgacgcccgctgcctggccacccgggatatccggctggcccgccgcctggtgcgggacttccttttccgcggccacggcgcagcgttcacgctggggctgtggggccatgtctgtgcaggcgaggatcgctacatcaagccctacaagccccgcgcgaatcttttactggacacgacccacacctacgaggtctgcctgtggcgcactgtgctggacacgatgcccgccgacccggcgctgaccgccatccaggcccgccaactggcctccctgcgggaaaaattcgctgcattcccggcgctttccaccgcgcttgtgccgcaaaacagtatgctgcgggagtttattggcgaataa

SEQ ID NO: 171 - DNA, 1485 bp, Unknown
  Unknown gut bacteria
atgaagcaaaataaattaaaactgcgctgcaccgaagattacgcagtgctctattgggataaacccgccgctgcgcccaaaggggcggagtataccgtctcgctgaacggcgaggtcatcggccgcacggataaaacacatttcaccatcgagggcctgccttacggcagcacttaccggctggaagttgccagcggcagctattgcgtcggggtcgagacgctgcaattcggcaaagaaaagcgccgcgtcaacgtaacggctgcaccctatttctgcaagggcgacggcaaaacgctgaacaccgacaacttgcagcgggccatcaacgactgccgcgccgatgacatcctgtattttccggcgggtgactacctgaccggggcgctgcagctgcacagcgatttggagatttatctttccaagggggctgttttgcagggcacggccaacatcaacgactattcgccccgcatccccagccgctttgaagggatggagatgcgctgctattccagtctgctcaacgccgggcggcttgaccacacgaaaggctcaggctgccataacatcatcgtgcgcggcaagggcaccatctgcggcggcgggcaggtgctggcaaagaaaattatcgaggacgagcgcgcccgcatcaagagctttttggacgataacgaggaacttgtcaaaagctgcgagaacgacgacacgatccccggccgtgtgcgcccgcgcttagtaaacctgagcaactgcgagaatgtctggttcagcggtattacgttcaaaagcagtccggcgtggactttccacatggtctactgcgataatatccagaccgaccactgcgtttttgaatccgagggcgtctggaacggtgacggctgggacccggattcctcgacaaactgcacgctgttcgccagcgagttccataccggcgacgacgcagttgccatcaagagcggcaaaaaccccgagggaaacgaaatcggccgtccctgcgcccacatcaaggtgtttgactgccgcatcgggtacggccacggcatctgcatcggcagcgagatgagcggcggtgtggaggacgtgcagatttgggactgcgactttgccaactcgctgtacggcattgagatcaaggccacacccaagcgcggcggctatgtgcgcggcgtgaccgtgcgcgattgcaccgccccgcgggtaattttgcacagcgtatcctacaatgacgacggcgaacccgcccccgagccgccgaagttcagccattgctggtttgaggggctgaccctgaccggccgcacgctggatcacgaccacatctggcaggacgccgcgcccatcgagattgtcgggttcgactgccatggcggggagatcgaggatattacgtttaaggatatcacaatcacgagggagagcgcagaactgaagctggggctgtgcagcggggtgaatctctacaacgtcacactctcc

SEQ ID NO: 172 - DNA, 1053 bp, Unknown
  Unknown gut bacteria
atgtttgatttttcgtttgatttgggcacgctggttccttctctgctgctggcgcttctggccgttgtgctgccgatgctcttccgccgcattgccgatggctttctaaggcgtaccaagtcccacatggcatcgtggctgcacattttgctggaaagttacgtttttccgcttgctatgatactgcgtgtttttcttttcttgctggctatttccatgctgccacttgtatttgtcacagatgccaaattccagaatgtattggatgtcggctccgatctgttggtcatcttttttcttgggcttggcagctggcgcgctgcgccggtttcccgtttgctgatgaaaagtgcggagaatcgtcttgacttgcagacccaccaaacaatgggccacttttttgagaatatctttcacgcgctggtcgtggtgttcaccggcattgcggcgctggaccgcctggttgtgccggtcagcggtctgctgaccggtgccggggttgccggcctcgctgtttcactggctgcgcagtccacactgtccaacctgattgccggcatcacgcttgtgctggagcatccttttggtattggggattatgtggttttcggagactatgaaggaaccgtcgaggatatctccttccgctctacacggatacgtaccccggataatgttgttattacgatagaaaactcgaaggttgccgccgagtatattcaaaactgtgattgccgcacaagccgcctgtggagttttaccatcggccttacctatgataccccccgcgaaaagctggaacgtctgacaacagacttgacaggtctgctgcttgcccagcctgatgtgaaggaaaacggcgtaagtgtcacgcttgataaattcaatgattacagtattgacctgctgtgccgcgtgtacataactaaaacttctctgcgcgattatttgcaggtcaagaaccgcctgaacctgctgattcttgataaagtccgcgcggacgactgcgagtttgctttccccaccacgacgctggatatgccaaaatcttaa

SEQ ID NO: 173 - DNA, 729 bp, Unknown
  Unknown gut bacteria
atgatgactgtaaaagaggtcagccgcctgaccggtgtgagcgtgcgcaccctgcaatattacgaccaaatcggcttgctgcaccccggcacccgcaccgaggcgggctaccgcctctacgatgccaccaccctggagaccttgcagcagattttgttgttccgtgagttgaaattctcgttaaaagagatcgccgtgatcctgcaaaacccgcacttcgaccgggaaaaggcgctggaacagcaaatcgagctgctgaccctgcaaaaacggcatctggaaagcctcatcactctcgcggaaaacatccgacaaacaggaggaaatgccatggattttaccgcatttgacacgaagaagctcgacgagtacgccgcaaaggccaaacagcagtggggcgcaacggcggcctaccaggagtacgagacaaagaacgcccatgagacaacacaggcccagcaggaaaacgcccgtgcgttgatggccctggtcgcggcgttcggccacatgcagacgaaagacccggctgacccggccgtgcaggcacaggtgcagaaattgcaggcgttcatcacggaacattactacacctgcaccaaagaaattttgcacagcctgggccagatgtacggtgcgggcggcgaatttaccgcgaacatcaacgcggcgggcggccccggcgcggcggagttcgcccggaaagccatcgagcgatactgctgcgggtga

SEQ ID NO: 174 - DNA, 1521 bp, Unknown
  Unknown gut bacteria
atgcactacaacaaatcgcccatgctgcgttttttcaacgcgctgtttgaatttatactgctggtcgtcgtttttatcattgcgggcgcgctgcgctccgtcagcccgatcggcagccgcttctttatgtgggacgtctgggcgtttttgcccatcgcggggctgtatgcgctggtgaacgtggcctgctatgtggtggaaggctgctaccgctcgctgcacagccagaacaaaatgcgccagctgttccagatcggcgtaacgaacctggtgggcctggcgatgatggcgacggtgttctacatcttccgcgtcagtcagctttcgcgtttgctgctggcctactattatgtcttgtcggtggtgggcatcctggccaagcggatgctgttcagcgccctggcgaccgcctatgtgcggcggcatgacattgtgccccgcacgctgatcatcggcagcggcgagctggctcaccggttctacaacgaagttttccgggaaaagaaaacgatggccatgcggtacagcggctacctggcggcggccccctgcgccgacctgcccgactaccgcggcacggtggccgacctgtttgaggtcgtgcgcacccagaaaattgaaatgctggtgctggcccaggatgtgcaggacgccgaggaagtgcgccgtatcatgctgctggccgataacttccacctgcgggtggcggcggtgccggtgtacaacgactttgtgaccgctcgcagcgaactggacagcatcggcggtatgcggtacatggacctgcggttgatgaacacctgcgacatcatgggcgtgaacatcgtcgtgaccgatatggacaagaccctgcgcctcatcgaggaaaaactggaagattggcgcgggaaatacatctgcgtggcaaatgtccacaccactgtgacagcccacgaggaccccgactaccagaaggtgcagaacggcgcagtcatggccctgccggacggcggcccgctctccaaatgcagccgccagcaggggtatggggacgcggcccgcgtgaccggccccgacctgatgaaggagttgctgaaggagagcaagaccaagcattaccgccattatttctacggctccacgcagaaaacgctggatgtgctgcgggaaaaagtcacggagaattatcccggggctgtcattgcgggaatgtactccccgccattccgcccgctgacgcccgaggaggacgaggacgtggtgcggatgatcaatgaggctaagcccgattttgtctgggtgggcctgggcgcgccgaagcaggagcgctggatggccgtacacgaggaccgtgtgcaggcgctgatggtgggcgtgggcgccgccttcgactacgaggcgggcaatatccgccgtgccccgcagtggatgcagaagcacaacctggaatggctctaccgcctgatgcaggaccccaagcggctgttcaagcggtattttgtcacgaacaccaagtatttgtggtggacgtggcggcagtga

SEQ ID NO: 175 - DNA, 1377 bp, Unknown
  Unknown gut bacteria
atgaaggagatgtacacccccatgaccaccgcacacaaaagccgcgtgctggatatgacccagggcgacccgttccgcctggtgctgcaattttcgatgccgctgttctgctcgaaccttctgcagcagctttacaatttgactgacaccgcccttgccgggcacctgctgggcgcggcggcactggcgcagatcggcgcgaccgccgcactgtacggtcttatcatgaactttgccttcggcatgaacaacggcctggcactgacggtcagcaggtatttcggcgccggggatgaaaatggtatgcgccgcgccgtgggctggatggtcacgctttcggtgggcacctcgctggtgctgaccgccacttccctgctgggccgcggtgcgctgttgactctgctgcaggtccccgccgaaacgtgggacggtgccgccgcctacctgaccgtaattttgctgggcatcccgctgacgatgctctacaatatggaggccgcgctgctgcgcgccgtgggcaacagcatcacgcctcttctgtttttactcttcagcaccgtgctgaatatcgggctggacgcggcctttatgggcccgctgggccttggcgtgcgcggcgcagccatcgccaccgtgctggcacagggtatcagcgccctgctgggcgtgtggtacatcctgcgcagctacccggaactgcggttccgcccggcccagctgaaagagacgacccgccatgccgtgacccatatgttctgggcgggcctgagtatgggcctgatgagcgccatctacaacctgggcagcgtggccctgcaaagcagcatcaacgcgctgggcagcgcctacattgcggcccagaccgccgcccgccgcctggctgagctgtactttatccccggcggtgcgcttggcatcggtgtggcgactttcagcagccagaacctcggcgcgggcaagcgcagccgcatctggcagagcgtaaaggccgcgctggtcatctattttgtgtggtgggtattcatcatggcgtttaccttcctctgcggcgaggcggccatccgcggcgtgaccggcagcgacgacgaaatcattattgccaatgccctgctgtacttgaaaatcagcgtgcccatcatcccgcccatggccgtgctggtcattttacggaatatgctgcaaggcatccagcacaccattgagccgctgctggccagcgccctggagctgatcggcaaagtgatttttgctgtctggctcgtgccggtctggggctaccgcgccgtctgcttctgcgaaccgacgacctgggtcatctgctttgtgttcatcctctttgccgcctggcgctgccgtggtgatttgagggatgcgtaa

SEQ ID NO: 176 - DNA, 813 bp, Unknown
  Unknown gut bacteria
atgttaaagatcggagaattttccaagctgtcccgcgtcagcgtccggatgctgcgccattatgacgccatcggcctgctgacccccgcctacatcgaccacttcaccgactaccgctattacagcgagtcccagctgcccaccgtctgccgcatcaccgccctgaaggacatgggcttccgtctggcggatatctgccggatgctgtccttctacgatgaccggcagcggctggacgaatgccttgccgcccagcaggcggcgctggaggcccaggcggaggacgtggcccggaagctgcggctgttggacagcgcccggaaacgactaagaaaggaagataccatggcttacaatgttaccgtcaagaccctgccccagcgttacgccgcctgtgtgcggatgaccattccctgctacgagcaggaggggacggtgtggggtgtcctctgcgccgagactgaccatatgaacctgatccccgacgatccctgctattgcagcgtgacctttttggacgccgagtataaggaaaaggacgtggaggtagaagctcagaaaaccgtcaagggtcagtatccggacaccgagcatgtgaagttccgcactctgcccgccgtcacctacgccggctgcacctatcagggcggctacgagcatatcggtgaggtcaacgccgccgtggccgcgtggatcgaggccaacggctaccgctatgccggccccatgttcaacatctaccacgtcagcccccacgagacccggaaccccgacgaattcgtcaccgaggtatgctaccccatcacgaaataa

SEQ ID NO: 177 - DNA, 1185 bp, Unknown
  Unknown gut bacteria
agggaaaaggagcatgaagccgtggagcggatctatctggacaacgccagcaccagctttcccaaggcggaaggcgtagcggaggcggtctatcagtatataaaggagtgcggctgtaacatcaaccgcggcggctatgacgaggcgtatcaggcggaggagctggtgctggagacccggcagaggctgacagcgctgttccacggcccggactgccggaacgtggcatttacccgcaatattacggagagcctgaacgtgctgctgaagggctttttgcgccccggagaccatgtgctggtgtccgccatggagcacaacgccgtcatgcggccgctgacccaactgcaaagccggggcgtgtcctttgaccgtatcccttgcgctggggacggtacgctggatacgtctgccatggcggctctgctgcgggataacacgcgggctgttgtgatgctgcatgccagcaacgtctgcggcacggtgctgcctgcggcggaggttggggctttctgtcatgcccacggcctgaaattcatattggataccgcccagacggcgggcgtgctgcccatcgacatggcggccatgcatattgacgcgctggcctttaccggccacaagggccttctgggcccgcaaggggtggggggattccttctccagccggacatggtgccactggtcacgccgctgatcgccggcggaaccggcagcgtcagccatgaggagcagatgccgtcattcctaccggataagttcgaggcaggtaccctgaacctgccgggaatcatgggcctgcatgccgcgctatgctggctggagcgggagaccatcgacaaggtgcgcagccacgaattggcgctgacagagcgctttcttataggggcggaggagatcccgaacctgcgcgtgatcggacgcaaggggacggaggggcgcgtcggcgtggtgtccgtcctgccggagaacgtggatcctgccctgatggccgacgcgctggggcaggaatacggtatcatggtgcgggtggggctgcactgcgcccccaacgcccacaagacgctgggcacatttcctacaggcactatccgcttttccttcgggcatcagaacacgacccggcaggtggacgcggcgctgctggcgctgcggaaattatgcgggaggaccacatggaactga

SEQ ID NO: 178 - DNA, 1566 bp, Unknown
  Unknown gut bacteria
atgaagctgaactacaaacgcaccattctggtgggctttgcctttttcctgatctgcgccttctggcaggcctatgacaacaccattcccctgatcctgaccaacaagttcggcatgagccagacctggtcgggcatcatcatggcggcggacaatgtgctggcgttgtttatgctgccgctgttcggcgccatctccgataaatgcagccacaaaaagggacggcgtacgccctttatcgtgatgggtacgctgatcgccgccgtggcgctgatctgtctcagctttatcgacaacgcccagctgaagcatctgggcgacgccgcgcggatcgacgatcccgccgccctgtccgccatctatgaaagtcaggcggacgagcagctgatcacgccccacggcgagaagttcgtgctgtcggagcggttcacggaggcggaattcgccgccatccgcagccagctcaccgacgagagcggcaagaccgtcaccaatcccgactacaccaactacgtgacccccgcccggcaggcctacgcctggcatgtgacggcggcgcatcccgccacgctggtgttcttcatcgctgtgctgctggtgattctggtggccatggccaccttccgctctccggcggtggcgctgatgccggacgtgaccatgaagccgctgcgctccaaggccaacgccgtcatcaacctgatgggcagcgccggcggtattctggtgctggcgctgggcatggcgttcgccaccgcgtcggtacacaacgcactgatgagctacaccgcctatttcgcggtgatcgccgccattatgctggcggcgctggtgatcttcattctcaccgtgcgcgaggtggagtgggcccagcagatgcagtgcgacagcgtggaatacggtgtggaggacacggcggaggacggcgcgtccccgcaggaggagcggaagctgacccgcggcgaggtgaagtccctgattttcattctgctgagtatcgtgctgtggttcttcggctataatgccgtcaccagcaagtactccgtgtacgccagcaacatcctgcataaagactataacctgaccctcatcatcgctcaggcggcggccatcgtggcctatctgccggtgggtgtgatctccagcagggtgggccgcaagcgggccattcaggcgggcgttatcctactgaccgtggccttcggcgtggcgggcttcctccacgcggagagccccacgctgctgatgaacgccatgttcgccctggcgggcatcgcgtgggccaccatcaacgtgaactccttccccatggtggtggagctgtccagcggcggcagcgtgggcaagtacaccggcttttactacaccgcctccatggcggcgcaggtggccacccccatgctgtccggccttttgatggacaagtggggtatgcgggtgctgttcccctatgccacggtgttcgtggcgctggcctttgccaccatgctgatggtgcaccacggcgacagcaagccccagatgaagctgggactggaagcattacaagattcggagatggattga

SEQ ID NO: 179 - DNA, 1773 bp, Unknown
  Unknown gut bacteria
atgttttcacagagctttttggacgagctgatcgcccgcaacgacattgtggacgtggtgggctcctacgtggcgctgacgccgaagggcggcagctattggggctgctgtcccttccacaatgagaaaacgccctccttccacgttttgcaggacaagcagttctatcactgcttcggctgcaaaaagggcggcggcgtcatcaatttcatcatggagatcgagaacctctcctatcccgacgccatccgctttctggccaagcgggtcaacatggaggtgccggaggatcgggaatccgccgacgccgaccggctgcgtaagcgactgctggcgctgaaccgtgacgcggcccggtggtactacgacgtgctgcaaagccccgacggcgcggcggtgcgggcatacctcgacaagcgcgccatctcccggaagattgctgtgcggttcggtatgggcgcgtcgccggacagctgggacgcgctgctgcgcaccatgaccggcaggggctacaccaagcaggagttgctgaccgccggactgatcgtggccaacaagagcggcggcttttacgataagttccgcaaccggctgatgctgccggtcatcgatgtgcggggcgatgtggtgggcttcggcagccgcgtcatcgacaagtcggagccgaaatacatgaacagcacggagacgccggtatacagcaagcgccgggtgctgtacggcctgaatctggcgaaaaagaccaagcgtcccaacatgatcctgtgcgaaggcaaccttgatgtggtgacgctgcatcaggcgggcttcgacaacgcggtggcctccatgggcacggcgctgacgacggagcagattcgattgctgggacggtacaccaaggagctggtgctgtgctacgacaacgacaacgccggtcagctggccacccagcgggcgctggagatgctgaacaacaccgagttcaccgtccgggtactgaagctgccccggcggctggtggacggcgaatatgtgaagcaggatgccgacgatttcatcaagtttcagggcgctcccgccttcgagcggctgctgtccggcagcgagaacggcgtggagttccgtatgtcgcaggtggccgccaagtacgacctgcgcagcgatcagggccgcatcgactacaccgccgagatcagtcaggtgcttgccgagctggacaacgccgtggagcgggaggtatacgccaatcgtgccgccgagacggcaggactttcgcccgacgccatgcggcaggaggtggagcgggccacccgcaagcgccgctatagcgaccgcaaaaagcgggagcggcaggagctgaaccccgccctgaccgtacagcccgcccagcggggcagccgctataccaatctccgcagcgccatggcggaggagggcgtgatccggctgctgcaccttgaccccacgctgttcggggacacgccgcccctgacgccggaggagttctcctcgccgctgttgggaaaaatttacggcgccatgtggcaccagcgcggcaaccgcagcggcctgtcggcgctgacgggggagctgtccggcgacgagatgagccacctgaccacgctgctgcaaaaaccggaatccaccgccaacgcgtctcaggcgctggcggactacatacgggtgatccgcgaagagcagaccaaacgggacgactccggggtggatcccctgctgttggcaatggaaacatttaaagataagaaacgatatggaggaaagcgcacatga

SEQ ID NO: 180 - DNA, 1332 bp, Unknown
  Unknown gut bacteria
atgttaaaagtagcaaaattcggcggctcttccatggccgacgccgtgcaatttgccaaagtcaaggccattgtagaggccgacgacgcccgccgcgtcatcgtcgtgtccgcccccggcaaacggtacaaggacgatcacaaggtgacggatctcttatatttgtgcagcgcccacctgaaatacggcgtcagctgcgagaaaattttcgccctgatccgccagcggtatcagcagatcgccgacgactgcggcctgtccctcgatctggcggcggagttcgacgctctgtggcagcggatgtgcagcggtgaagcggacgaggagtatctggcctctcgcggcgaatatttcgccgcccggctgatggcggagtatctgggctatacctttttggacgcggcgctgtggctgcggttcaagtttgacggcacggtggatcaggaagccagctatgaggcgctgcggaaggcggcggacggtcagcgggtggtgatccccggcttctacggggctatgcccgacggccgggtggtgaccctgacccgcggcggcagcgacatcaccggcgcggtggcagcggcggcgctggacgccgccgtatatgagaactggacggacgtgtccggtatcctgatggccgatccccgcatcgtggagaaccccgaacccatccgccgcgtcacctacagcgagctgcgtgagctgagttacctgggcgcgcaggtgctgcacgagggcacggtgttccccttccgggagaaaaatatccccctgaacatccgcaacaccaacgatcccgcccacgacggcaccatgatcctcagcagcatcgacgacgaggagcaggacgaaagcttcatcaccggcatcgccggcaaaaagggcttctccatcatcaccatcgccaagagcggcatgtcctcggagcccggctctctgctgaagctgctatccattctggccaagcatcaggtaaacgtggagtacgcgccctccggtatcgacaccgtgtcgctggtggtggaggccgccaaggccgccccgtgcctgtacagtatgctgggcgagatccagcaggaggtgcagcccgacaccatcaaagtgacggagcacatcgccgtggtggcggcggtaggccggaagatggcgtaccgtctgggcgtgtccggtaagatcttcagcaagctgggcgagcacggcgtcaacattcgtatgataacgcagggcccggaggaattgaacattatcgtgggcgtagaggaaagggattttgagcaggccattcgtgtcctgtatgacagctttgtaaaggaggaagttgcaaaatga

SEQ ID NO: 181 - DNA, 1317 bp, Unknown
  Unknown gut bacteria
atgggcggcgtggttgtctgcttcgccctgtttctggcggcgatggcggtctgccttgtcatgggctggtcgttcctgtgggcgctgctgctgggtctggcgctgttcacgctccacggccgcaagcagggccacagcctgcaaaccatgtggggcatggcctggtcagagggccgcaaggtgctgatcgtactgcgaatctttgtgttcatcggagccatcaccgccctgtggcgcagcggcggcaccatcgtgtttttcatctactacggcgtacaggccatctctcccaagctgttcgtactggtggcctttctgctgacggcgctgatcgcctacgcactgggcacgtccttcggcgttatcggcacggcgggtatcgtgctgatggctctggcccgatccggcggcgtcagcgaggcggtggcggcaggcgcgatcctgtccggcgcgtatttcggcgaccggtgctctcccgcgtcctcctctgccgcgctggtggcggcggagacggggacgaagctctatgacaacctgcggaacatgctgcgcaccggcgcgctgccggtggtgctgacggtgatcgtctacgctgtgctgtccgtccgccaccccatcacggcggtggacgagagcctgctgcaagccctgtgggacagcgctgtcatctccctgtgggcgctgctgccggcggcggtgatgctggtgctgccgctggtgaaggtgccggtgctgatcagcattgccctcagtgtggcggcggcgggactggtcagcgtgttcgtgcagggcatgacggtgtgggacatgctgaaaacggcggtggtaggctactatcccgccacgggacagctgaaggatatcctctccggcggcggtatcgtctccatggtgaagccggcggcgctggtgtttaccacggggctgctggcaggtttgctggacggtatcggcgtgctgaactgcgcggtgggactggtggaaaagctggcccggcgctggggccgctttgccgcttcggcggcggtgagtctgggcgcgggtatgatcttctgcaaccagtcggtggtgatcgtcatgggcaatcagctgctgcaccgctgctataccgaccacaatgagcaggcggtggacatggaaaacagcggcatcgtcctgtcggcgctgatcccgtggaacatcgcgtgcagcatcccattggtgatgctgggggtggatcagcgggccattccttacgccgtgctgctgtacatgatcccgctgatctacggcctgacaaaacgatatgtgtatccccataaggagaaatgtgtatga

SEQ ID NO: 182 - DNA, 981 bp, Unknown
  Unknown gut bacteria
atgataccgtattttgacgctcactgcgataccatttaccgctgtctggagaccggcgagacttccgcactggagtatggcgaggatcgggaggagcagcgccgttattacgccgcgtccacccatctgcgaaaaaacggcggccatatcgatctggaacggggactgaagttccggcgctgtgcccagtttttcgccctgttccacgacgcggcggaggctccggctgacggcatgtgggcacaatgtcaacggatgcacgatttcttcctgcgggagatggcggacaacgccgatatcgtccgccattgccgcaccggcggggaagtggatgtcacggtggtggagggtaaggtggccgcgttgctgagcatcgagggcgccgacctgatcgactgcgacgtacataagatcgaaacggtgtccggttggggcgtgtggctgctgaacccggtatggaaccgtgccaatgtgctgtccggcaccaatgccgaggaaccggagcggggactgtccgccgaaggccgggactttattcacgtgctggaggagcacgagatctatcccgacgtgtcccacctgtccgacgctggcttctgggatcttgtccgcatggcgaagcggcccatcgtggcgtcccactctaacgcacgggccgtctgtccccaccgccgcaacctgacggacgaccagttccgggccatccgcgatctgggcggcgtggtgggcctgaacctgtatcttgattttgtgggccagcccacgatggatgcgctggcggcccatgtggagcacttcctgaacctgaacggcgaaaaaacggtgtgtctgggcggcgatctggacggctgcgaagcgctggccgccggtatgaccggcatgcaggatgcgccgaagctgtacgacgcgctgaaagcccgcggctacagcgaggcgctgctggaggatatcttctggaacaacctccgccgcctgatctga

SEQ ID NO: 183 - DNA, 624 bp, Unknown
  Unknown gut bacteria
atggtaaatagcaaagaggctagttttgcctatttggagacattgagcgacgagcagctatgcgccgcctgccaattggggaaccgcaacgccgaggaggttctggcggcgcggtatcaccggctggtgcgtagcatcgcccgaccctactttcttgccggcggagacaacgaggatctgctgcaggaggggatggtggggctgatcaaggccatgcgggaatacgacccccatcaggccgcgtccttctgcacctttgccgaggtatgtatccggcggcggctgtattcggtgctcaaatccgcttcctcaggcaagcatcagcctctcaatcaagcgatccccctgaatccctcattctttgacgtcagtctcgcttttgcacaggtcgaccccgaggtcctgctgattgacagggaaaaaaccgccggtctgctggagtacacatgcaaacagttatccgccttcgaagctgagattttagggtactatttggacggttttacatgtcgtgagatcgcagagactgtgggcaagccgccaaaatcggtggaaaatgctgtgcagcgcatacgccgcaagatcgggcggcaacttcaatctggcgatatcagcaaaggctga

SEQ ID NO: 184 - DNA, 915 bp, Unknown
  Unknown gut bacteria
atgaccttgcagcagctgaaatacgtatccatggtggaaaaatgtggctccttcagccgggccgcccaaaagctgtacgtctcccagcccagcatcagcaatctggtgaacgcgctggaggaggagctgggcatcaccattttcacccgctcctccaccggcattgccatcaccaacgaggggcgggagctgctgaagctcagcaaccgcctgctgcgggacgccgactacatcagcgagtatttccacagcgacacggagcaagaaaagccctccttcttcctcagcagccagcactacgacttcgtggtcagcgcctttgaggaatttgtgggcggcatcgacgccgaccgctatacgctggggctgaaccagacccagaccgccgccgtcatcgaggacgtgcgcaagcagtacagcgacatgggcgtgatcttcctgtcggacgtgaaccgccgccacatgctgaaggtgctggaggacaacaacctggaattccacagcgtatcccgcgccgcgccccacgcctttctgtcggtggagcatccgctggccaagcgggagagcgtgacgccggaggagctgatggactacccctgcattgtctatgagcaggacggcgactcccccggcttcttctcggaggagatgatgctgcccaatttctacccccggaaggtggtctacatcagcgacctgtacgtgagtacggcgctgatgcggggctgcaacgcctacgacatcggcaccggcgtgatctcaaagcggctgtcccgcgaggtggcctgcgtgcctatcgccaccgacgaccgggtggatatcggccggatcggcattcgggacagggcgctgcggcccattgagcgctcatttctggactgcatgacccggcagctccacgccgcacaggggtaa

SEQ ID NO: 185 - DNA, 1350 bp, Unknown
  Unknown gut bacteria
atggcatacgaagaatttctgggtatgtatcaatccaagctgaccacggcagaggaagccgtaaaagtgatcaaatccggcgactgggtggattatggcttctgcaacacccacccccatgttctggacgaagcgctggctcgccgcgctcccgagctggaggacgtgaaggttcgtggcggtatcgccctgtggaagcccgcgatcttcgatatcgaggagcctgccaagcatatcatctacaattcccaccacaccggtggctttgagcgtaagcacatcgataccggggcctgcttctatgagcctatgcgctattccgagctgccccgttactattatgaccatatcaatccgccggatgttgccctgatccaggttggccccatggataagcacggctacttcaacttcggcgtttccgcttcccacatgaaggccatctgcgacacggccaagatcctgatcgtggaggtcaaccagaacatgccccgctgtctgggcggctttggcgagagcgtacatatcaccgacgtggatatgatcgtggaaggccgcaacgaccccatgggtcagatgctgtccgcacctcccacggagatcgacaaggccgtggccaagcaggtggtggagcgcattcccaacggcgcctgcctgcagctgggtatcggcggtatgcctaacgctgtgggtatgctgctgtgcgagtctgatctgaaggacatgagcgtccataccgagatgtacgtggaggccttcgtagatctgtccctgtgcggcaagatcagcggcgccaacaagagcatcgaccatggccgccagacctattccttcgctgccggcagccagcgggtctatgacttcctggatgacaaccgcatgtgcatggctgctcccgtcagctatgtcaacgatatccgcaccatcgcttccatcgataacttcatgtccattaacaacgcggtggatatcgacctgtacggtcaggtcagcagcgagacctccggcatccgccacatttccggcgccggcggccagcaggacttcgggctgggcgcatacctgtccaacggcggcaagagctttatctgcctgtcctccaccttcaagaagaaggacggcacgctggcttcccgcattcgtcccacgctggcagagggcagcatcgtcaccgatacccgcgtcaacaccatgtatgtggtcacggagtatggctgcgtcaacctgaagggcctgtccagctgggagcgggccgaggcgctgatctccatcgctcaccctgatttccgcgaggagctgatccaggctgcccagaagcagaagatctggtatcacagcaacaagcgctga

SEQ ID NO: 186 - DNA, 627 bp, Unknown
  Unknown gut bacteria
gtgattttttataccgccgatcttcactttctctatgaggcgctgctgtcctcccggccctttgccacagtggaggagatggacgagacgctgatccgcaattggaacgaaacggtatcgccggaggacaccgtgtatctggtgggtgatatcgggtataacgaggggcaggttccccaccagctgctctcccgcctgacgggacacaagcacctgatccggggcaaccacgacaccgggtacgaggacgccgcctccctctaccgctatttcgagaccatcaccgacttcaatgagatcgacgacggtgagacccatattctgctgtgccactaccccatcatttaccgcaagcggggctatatgatccacggccacattcatcagagccggggacaggagtaccaactgctgaaggagctgccccgtgtgctgaacgccggggtggatatcaatttctaccgccccgtgacgctggaggagctgatcgaaaacaaccgcgccttctacagcggtgagtgggatgacctgatccctccgccgccccgcacgccccggggcgataagggctggcttccggccacgccggacttccgccccatcccggagcggccaaacggccaatga

SEQ ID NO: 187 - DNA, 828 bp, Unknown
  Unknown gut bacteria
atgtcctttggagagcagctacaggaggtgcggcggagcaacggcatgacgcaggagcagtttgccgaggcgttacaggtgtcccgtcaggcggtgagccggtgggagtcgggccgcagctacccggaggtggataagatcctctatatctgcaaccgctacggcgtgtccatcggcacgctgtttgccgaggagaatcccactcccgacagcggcagaccccagccgcctcagacggcggcccagccgcccaaggacagcctgttcacctcgctggattctttcatcaccaacttatcccctaagagcaagtggatcggcatgggtattctggtgggcgtggcgctgctggcgctgctgattggcctgtgcctgaaaggaggaagcggagacatgtcaacgatcatatggatcgccgccatcgtcatcttcggcgtggtggaggcggccacggtaggactggtgtccatctggttcgtcatcggcagtgcggcaggcctgatcgccgccgtgctggacgcgcccatctggcttcaggtggtggcgttcttcatcgtgtccattgcggcgctgatcgccacgcggccgctggtgaggaagctgggcagcaagggcggcaccgctaccaacgccgaccgggtgctgggcggcaccgcccgcgttaccgagaccatcgacaacaccatcccctccggcgaggtgtacatcgacggcaaaacatggacggcccgcagcgaatccggtgcggtcatcgccccggagacgctggtaaaggtcatccgcctggagggcgtgaagctgtatgtggacgttccccataacgtgtaa

SEQ ID NO: 188 - DNA, 786 bp, Unknown
  Unknown gut bacteria
atggacaaacagcgctgcatcgccgcggcggcggaaacggaggaggaccggctgctgctggcccggctctacgataagctgaaccacggggcggagcgggagatcttcagctgcacggcgtttctctcgccccgtgagcaggccatggtgaagaagctgctgccccatgtgccgctggtgtttttcggcggctgcgacggggcggagcgctgcatggcctgctacgtgccggagtatctgccggaggactatctgacctcggaggacggcccggcggctgccgtgcgggccgtgtactatgagaaggacgcactgacccaccgggattttctgggcagccttatgggtgcgggcatcaagcgggaaacggtgggggatatctatgtctctgccggacagtgcgacattctggtgacgcggcagatcttgccctacctgctggagcagtgggacagcgcgggccggacgaagctgcacctgtcggtgatcccgctggcggaggtacagcgcccggcggtggaaaagcgggagatcagggacacggtgccctcgctgcggttggactgtctggtggggtcggccttttcgctggcgcgagggcctgccggacagctgatcgccgccggaagggtggccgtcaacgatctggtgtgtctcaagggcgaccggcaattacagcagggcgaccgcatcgccgtgcggggactgggcaaggcagcgctggcacaggtgggcggcaccacccgaaagggacggctgtccgtcacgctggagcgctggatataa

SEQ ID NO: 189 - DNA, 1527 bp, Unknown
  Unknown gut bacteria
ttgaccagtcgtaaaatcatcaacagtaaactgaaggaagcggtggattccgtattgcccatcaccctgatcgtggcggtgctgtgtttcttcttcgttcccgtgggcagcggactgatgctggcctttctggtgggcgcggtcatgctgattttgggcatgggcctgttcacgctgggcgcggagctgtccatgacccagatgggcaatctggtgggcgcgaagatgaccaaatcccgccgcctgtggctcattctggtgctggccttcgttctgggcgtggtcattaccattgccgagcctgacctgcaagtcctggcccagaacgtgccgggcatcgacaagaccatgctgatcctcacggtgtccgtgggcgtgggcatcttcctgaccatctgcatgctgcgtatcctgctgggtatctccttgcggacgctgctgctgatcttctatgccattgtgtttattctggccgccctgtccgacccggacttcctgtccgtggcctttgactccggcggcgtgaccaccggccccatgacggtgcccttcatcatggcgctgggcgtgggcgttgcctccatccgaagcgacgaaaaggccaagtccgacagcttcggtctggtggcgctgtgctccatcggccccattctggcggtgctgctgctgggcttcctgtacccggaaaacaccgcctctgcctcggaaacggtggtcaacagctttgaaaataccctcaccgtgggctacagctatttggaggagctgcccgccatgatgggcgaggtggccatcgccctgctgcccatctgcgtgttcttcctgctgttccagatcttctcgctgcatctgcggaagctgcccctgctgcgcatcctcatcggcgtgggctatacatatgtaggtctggtgctgttcctgacgggcgtcaacgtgggcttctcgtcgctgggctacgtgctgggcggcgtcatcgtggaggagggtcttggccttctgatgatcccgctggccaccctgatgggctggttcatcatcaacgccgagcctgccgtccacgtgctgaacaagcaggtggaggagctgagcgccggcgctatttcctccaaggccatgggcatgagcctgtccatcgccgtggccgccgccatgggacttgccatggtgcgcgtcctgaccggcatctccattctgtggttcgtgctgccgggctatatcatcgcgctgggtctcagctttttcgtccccagcatcttcaccgccatcgccttcgactccggcggcgtggcttccggcccgctgaccgccaccttcatgctgccctttgccatgggcgctaccacggcgctgggcggcaatgtgatgaccgacgccttcggccttgtggcgctggtggccatgatgcccctgatcgtggtgcaggtcatgggcgccatctacgtggtcaagacccgccgcaacagtgcgcaggaatccgcgcccgtattcagcaacgagggcgttatcgaactgtgggaggtggcctga

SEQ ID NO: 190 - DNA, 1332 bp, Unknown
  Unknown gut bacteria
atgaagatacagttatccgatcactttacctataaaatgctgctgcagttcgtgctgccgtccatcatcatgatggtgttcacctccatctacggcgtggtggacgggctgtttgtgtccaatttcgtgggcaagacccccttcgccgccgtgaatctggtgatgcccttcatcatggtctttggcggcatcggcttcatgttcggcaccggcggcagcgcactggtggccaaaaccatgggcgagggcgacaagcaccgcgccaatcagtacttcaccatgataatcgccgccaccctcatctgcggcgtcatcatctccacgctgggcgtgatctttatggagcctatctccgtctttctgggtgcggacgcggaaatgctgccggattgcgtgctgtatggccgcatcgtgctggccttcaacacggcgtatatgctgcaaaacgtgttccagagcttcctgatcgcggcggaaaagcccaagctgggcctgtgggtcacggtggcggcgggcgttaccaatatggcgctggacgccctgttcatggcggtgttccactggggcgtggcgggcgctgccatcgccactggcatcagccagatcgtgggcggcgtgctgccgctggtgtacttcctgcggcccaacagcagcctgctgcagctgacaaagacaaagctggagctgcggcctatcttgcaggccagcggcaacggcgcgtcggagctggtcagcaacgtgaccgcctcggtggtgggcatgctgtataacttccagctgctgcggctggcggggcagaacggcgtggcggctttcggcgtgctgatgtacgtggagttcatcttcgccgccgtgttcatcggctatgccatcggctgcgcgcccatcgtcagctatcatttcggcgcgggcaaccggggcgagctgcagaacctgctgcggaaaagtattctgctgatgggcgtgggcggccttgccatggtgggcgtggcccagggactggccggacctatggcacggctgttcgtggggtatgacaataccctgtgccggatgacggtgcatgccttccgcatcgccacattgtccttcgtgctggtggggttcaacatcttcgcctcgtccttcttcacggcgctgaacgacggcgtggtgtcggccatcatttccttcctgcgcaccttcatgttcaagctgtcggcggtactgctgctgcccctgatctgggagctggacggcatctggtgggccgaggtggcggcggagatctgcgctttcggtcttggcatggcgttcctgctgggcaaacggaaaaagtacgggtatatgtga

SEQ ID NO: 191 - DNA, 1134 bp, Unknown
  Unknown gut bacteria
atgatttatctggatcacgccgccaccacccccattcctcaggctgttgccgacgagatgtaccgcgtgctgacgcagcagttcggcaatccctcctcccagtacccgctgggacaggatgccaagaagatggtggagggctatcgggccgctatcgccggggcggtgggctgccagcccaaggaactgcatttcacctcctgcggcacggagagcgacaactgggccattcaggctgccctgtggcagaaccgccatgtgggcaagcacatcatcaccaccaccgtggagcacagcgccgtgctggagacctgccgtgcgctggagcagcaggggtacgaggtgacgtatctcaagcccgacaagaccggccacatcaccgcccaacaggtgggcgacgcattgcgggaggatacggcggtggtcagcgtgatgctggtgaataacgagaccggctgcgtgttccggctggcggagatcgccgccattttgaaggcacgcaaaagccgcgccctgctacataccgacgcggtgcagggttttatgaaggtgccctgcgaccccaaaacgctgggggtggatatgatgagcctttccgcccataagatcggcggccccaagggtatcggtgcgctgtatgtgggccccaacgtccgcaacatccggccgctgctccacggcggcggacaggaggagggcacccgctccggccccgaggccaccgcccagatcgcgggctttgccaaggcggcggagctgcgcgctgacggtctggcggacaagctggcccacatggcggaggtcaaggcctgctgtaaagagaagctcctttccatcgacggcgtagtggccgtgggtcagggagaagcgccccatatcctgatggtgtcgctggtgggctaccccagcgccaacgtggtcaccgatctggggagccagggcatctgtctgtcggcgggcagcgcttgccaccggggcaagctgagccacgtggtgacggcgctggggctggacaaacgcaccgccaacggcgtgctgcggatcagcttcggcccggaaaccacctttgccgagatcaacgccctgtacgaggcgcttttgcggcacaaaaacacccgatttcctatgctatga

SEQ ID NO: 192 - DNA, 1632 bp, Unknown
  Unknown gut bacteria
atgtacgaaaacggcaagatctatatgggtctggcggacggacagcgggtggagctggctctgaacatgtgcaaccgtcacggcctgatcgccggcgccagcggcaccggcaagaccatcaccatgaaggtgatggccgagtccttttccgatgcgggcgtgcccgtgttcctgtgcgacgtaaagggcgatgtggcgggtatctgctcgcccggcgtcagcaacgagggcatggaaaagcgcatcgacaaattcggtgtccgcgatacctttacctataaagcataccccaccaccttctgggatatctatcaggagggcggacatgccgtccgcgccaccgtcagcgacatgggcccggagcttttgagccgcattctggggctgactccggcgcaggaggggatcctgcacatcgtgttccgcattgccgacgacaagggcctgctgctgatcgacctgaaggatctgcgggccatgctgacctacgtgaacgagcaccgctcggagtacatgatgacctacggcaacatcacctcccagtccgtggcggcgatcctccgggcgctgctgccgctggagcagcagggcggcgacctgttcttcggcgaaccggcgctggacatccgggactggatgcgcaccgacgccgatggacacggcatgatcaacgtgctggactgcgtcaagctggtgcagaaccccaccctgtacgccggtttcctgctgtggatgctgtcggagctgttcgagaatctgccggaggccggtgatctggacaagcccaagctggtgttcttcttcgatgaggctcatatgctgttccgggacgcgcctgccgtgctgctgcagaagatcgagcagacggtgaagctgatccgctctcgcggcgtgggtgtgttcttcgtcacccagagtcccagcgatattcccaacgccgtgctggcccagctctccaatcgggtgcagcatgctctgcgggcctatacccccgccgagctgaaggccgtccgggtggcggcgcaggccttccgggccaacccggccttccaggcggaggacgccatcatggagctgggcgtgggcgaggcgctgccctccttcctggacgagggcggcgtacccgccatggtgcagcgtaccaagatcatctgtccccagagcctgatggccgcaccggagcccatggtccgcgccaaggtgctgatgcgggacggcatggagaaatatgacgactacgtggacaatctgtccgcctatgaggtgctgacggaggaggccaaaaaggctgagaccgccaagcaggaggaggccgaccgcaaggcccgtgagaaggcggaggccgaggcggaaaaaaagcgtctgaaggaggaagaagccgacaagaagcggcagcagaagttggaggacgaggcgcgcaagcgcccgcagaagctggacgatgaagcacgccgccgccagcacaagctggaggatgaggagcgccgcaaggccgagcgccagcaggaaaaggcggaagccgaggccaagcgtaaggcggagcgccgtgcagccaagattgaaacgcagctgatctccgccggagggcagatcctcaagcggggtctgctgggcgtgttgaaaaagagataa

SEQ ID NO: 193 - DNA, 1347 bp, Unknown
  Unknown gut bacteria
atgaaaaagctactggctctgctactggctctgctgatgcttctgtcccttgccgggtgcggcaagcaggcgcaggaggacgaggagcccgccgtgatcgagctgacgctgtggacgttccccgcaggcgactggggcgatccggccgccgtggagacgctgctgacccagttcaacagcgtataccccgacattcacgtgacggtacagtgtctggacgaggccaccggcgacgacaagctcagcaccgccgtggacggcggcgtgtcccccgacattctgctggcccagccggatcgtctcatcaaagcatggggcgcagagggcatgctggccgatctgtccgacatgtgggacgacgccgacaagcaggaggtcaacgccgcctgccagagcgtctgcttcacccgggacggcaagtgctacgcctatccctttgccatgaacgtgcagtgcatggccatcaactatgacgccttcgtcaccgcaggcgccgaccagtacatcgatctggagacacgcacctggaccaccgagcagttcacccaggccgtcaaggcgctgcaaagcaagtacggcgaggcggtggccgccgtgtactgctccggccagaacggcgatcagggtacccgcgcgctggtgacgaacctgtacggcggccagttcgccaacgactcctacaccggctacgtcgccaactccgaggccaaccagcaggcgctgaccctgctgcgggacaccaagggcattgaatttgacgacgccatcaatgggcaggaggaggccgcgctgttctatcacgaatccctgaaaatgtccttctgctggagtcttgcccagcagctggccgagacggtggacgagcccaccgaggagggcggcgagccggtggtgcatccggcgggcaagaccgtcaacggccagaccatcgagttcatggccttccccaccgatcccgagatcagccagccccggcttcagggcgatatctggggcttcggcgtgtttgacaacggcgatcaagagcggatcgaggccgccaagctgctgatccgtttcttcgccgacgggcagggcgccagcgccgccgtgaaggccgccgggtgcttccccgtccgcgacacggtggacggcgccgacctgcggaacatctgggcgggcagcgacgtgatgacggaatacgccaagctgacggacttcctgtccggctatgacgcgctgacgcccggctgggccaccgcccgtactgagtggtggaacatgctccagcgggtgggcaacggcggcgacgcggtgctggaaaccgacaccctcgtggaaaacgccaacgccgcagcgaaggagtaa

SEQ ID NO: 194 - DNA, 822 bp, Unknown
  Unknown gut bacteria
atgcgtcctgacggcaagcgggtcaaagaccttccgcccattgtggcggctattccctatatcatgcccaagcggtatgacgcccagaacaccattaccgagtatattgacgaggagctgatcaagtcctacatccgggaaaagcgccgtaccggcgtccggatcaaccatatggccgtcatcatcgccgcctactaccgggccgtgatgtataaccccaagctgaactacttcatcatgaacagcaaggtatacaagcggaaccacttctgcgtgtccttcgtgatcctgaagaagctggcggacggacggcctgacgaaacgtccctgaaaattttcctgacgccggaggacaccgtgttctccatccagcagaagatcaccgacgccgtgtccgccaacgccgccaccgagcagaagaacaataccgacaagttcgcccggatgatgttctccatcccgttgctgcccaagatcgtcatctggctggcctaccatctggataagctgggtctgctgccccggaagatcatcgacctcagccccttccataccagcatgttcatcaccaatctggcctccatcaagaccagctatatccaccaccattgctacgagttcggcaccaccagcgtgtttgtctgcatgggcaagcctgtgccggattacatgagcggcaatctcaacaagaagatcatgccgctgggtgtggtgatggacgagcggatctgcaccggctatgaatacgccgccttctgcaacgatttccgcaagttcctccgcaagccggaggagctggaaacgccctatcaggcggaataa

SEQ ID NO: 195 - DNA, 921 bp, Unknown
  Unknown gut bacteria
atgcggatcttatttatgggcacgccggaatttgcggtggcctccctaaaagcactggtggaggccggtcacgagatctgcggcgtctttacccagccggataagccgaaaaaccgcggccacaagctgacattctcacctgtgaaggaatatgccttgtcacagaatctgccggtgtatcagccgctgaagctgcgggacggcacggcgttggcactggtgcaggagctgcacccggagctgatcgtggtggctgcctatggccgcattctgccggaggatattctgaacatgccgccctacggctctatcaatgtgcattcctccatcctgcccaaataccgcggctcggccccgatcaactgggcggttctcaacggcgaaaaggtcaccggcgtgaccatcatgtatatggccgccgagctggacgcgggcgatatcatccgcgttgcagagactcccattgatccagacgaggatgcccagaccctgacggctcgtctggctctgctgggtgctgacgcgctggtgcagacggtgcacgacctgacggccggtacggccacccgtacaccgcaggagcacgacaagcacacctatgcccctatgctggataagagcatgagccccatggactttacgaagcccgcccagcagctgcacaatcaggtgcgtgggttgattccctggccctgcgcgacaatggagttgaacggcgctagcgtgaaggtctaccgtaccgcagtgggcgaggagaccgccgccgctcccggcgcagtcgtggaagccaacaagaaaggcattgctgttgcctgcggcgacggtaagctgctgcggattttggagctgcaagcacagggcggcaagcgcatgtccgccgccgcctatctggcaggccatccgatcccggtctgcctatga

SEQ ID NO: 196 - DNA, 1269 bp, Unknown
  Unknown gut bacteria
atggagcttctggagaagctgacgatcctctcggacgccgccaagtatgacgccgcctgcacatccagcggcgtcaagcgcagctttcagccggggaaaatcggcaacacgtcctcctccatcgccgggtgctgtcacagcttttccgccgacgggcggtgcattacgctgctgaaggtgctgatgacaaactgttgcgtctatgactgcaagtactgcgtcaaccggcgctccaacgacgtgcagcgcaccgcattcacgccccgggagttggctgagctgaccatcggcttttatcggcggaattatattgagggactgtttctctcctccggtgtgctgcgcaatgccgactataccaccgaacagatgatccgcgccctgcgcattctgcggcaggactatggcttcaacggctatattcacgccaaggccatccccggcacgtcgccggagctggtgcagcagctgggactgttggccgaccgcatgagcgtcaatatcgagctgccctctcagcagggattgcaaacgctggcgccggataaatcgcgggaagcgatcctgcggcccatggggttgatccgggacaaggcgttcgagagccgtcaggagctggtcaagtacaagcacgcgccccgctttgccccggcgggacagagcacccagctgatcgtaggcgctacgcaggacaacgaccggcatatcctgcgcttgacggaggcgctctatcagaaataccggctcaagcgggtgttctattccgcctatgttccggtggtggaaaacagccttcttcccgctctggataccaagccgccgctgctgcgggagcatcggctttatcaggcggactggctgctgcggttctatgggtttcaggcctccgagctgctggacgaggcgcacccgaattttgatccgcagctggatcccaagtgcagctgggcggtaacgcatctggagcagtttccggtggaggtcatgcgggcggattatgaaacgcttctgcgtgtgccgggcgtcggccccaccagcgccaagcgcatcgtctccgcccgccgcacggcgcaccttcgatttgaagatctgaaaaagctgggggtggtgctcaagcgggcgcagtttttcctgctttgcgatggccgcgccgcgccgggactccatttttcacccgctaccctcgtgcagcagctgaaggccgtggagcgcggcgcgctcccctccggggaaatggaacagctatcgctgttcgacgcagttggataa

SEQ ID NO: 197 - DNA, 480 bp, Unknown
  Unknown gut bacteria
ttggaacccatcattcgtgtcgatcatctgacacatacctatagcgccggaacgccctttcagcgcagcgccgtcaaggatatgtcgctggacattctgccaggcgagtttctgggcgtcatcggccataccggcagcggcaaatccaccctcatccagcacctcaacggccttttgaagcctacggacggccacatctacctgaacgggcaggatatctgggccgaccccaagcagatccgtcaggtgcgcttccatgtggggctggtgttccagtatccggagtatcagcttttcgaggagacggtctataaggacgtggccttcggccccaaaaacatggggcttgacgacggggagatcgaccgccgtgtccgccagtcggtgcaggccgtaggtctcagcgccgacgtgctggagaagtcccccttcgccctgtccggcggccagaagcgccgcgtggccatcgccggcgtcatg

SEQ ID NO: 198 - DNA, 867 bp, Unknown
  Unknown gut bacteria
atgaaacagaacgtattacatacgatacgtgccagccgagacagcttctccaagggacagaagcggatcgctgactatatcctgaacaactatgacaaggccgcgttcatgcccgccgcccgtctgggacagacggcgcaggtcagcgagtccacggtggtacgctttgtcgccgagctgggctacagcggctatcccgccatgcaaaaggccttgcaggagatcatccggggcaagctgacctcggtgcagcggatccaggcgtctcaggatcagatgaccggcaacgacattctggccacagtgatgcagcgggatatggacagcatccacaacgccatcgagcaggtggatcgcggcgagttccagcatgtggtggaactgttgctgcatgcccagcacatctatattctgggggtacgctccagctcatttctggcgggctatctgaatttctatttccacctgctgttcaaaaacgtgatctatgtgcagaacacggcggcgggcgagatctatgagcagatgatccacatcggccccggcgacgtgatggtgggcatcagcttcccacggtactccaatatgggcattcacgccattcagctggctcatgaccgtggcgcggatgtggtggccattaccgacagtcagctgtcgcccctgtatccattggcgacggcggcgctgctggtgcggtgcgaggcgctgtcctatgtggattcgctggcggcgccgctgagcctcatcaacgcgctgatcctggcggtaggccagcggaagcgggacgaggtggcgcaggtgttcgccgacatggagcaggtgtggtcaaaatacagtatttttggaaaagcggaagatgaataa

SEQ ID NO: 199 - DNA, 1632 bp, Unknown
  Unknown gut bacteria
atgagcctgtacgcacgtctggcgtgggacggcatccggaaaaataagcgactgtacctgccctatatcctcacctgcgtgggcatggtgatgacgcattatatgatgagcgagctgtgcgccagcgacctgctgcggtacatgaagggcggcggcgcgtcccatattattctggggctgggcagctgggtcattgcggtgttctcggcgctgtttctgttctacacctattcctttttgatccggcggcggcagcgggagttcggcctgtaccacgtgctgggtctgggcaagcggcatctcgcgctgctgtgcgccattgagacgctgataacggcggccgtcgcgctggtggcgggattgattctgggcgtggcgttgtcctttgcggtggagatgggcctgcgctccaccgttcaggcggagatggacttcacctttgcggtgaggggcagcgttgtggcgcagacggcgctggtctatctggccatctttctgctgacgctgatcagcacactgataaaggtggggcgggggagcgccgtctccctgctgcacagcgagaattgcggcgaaaagccgcctaaaggcaacctgtttgtggcgctgctgggtgcggtgctgctgggaatcgcctactttatggcggtgtccattcaggagccgatgaaggcgctggcgctgttttttattgcggtgatcctggtgattttggccacctatctgctgttcatcgccggaagcgtggcgctgtgccgggtactgcaaaggaaccggaattactactatcagcctcggcatttcgtgtccgtgtcctctatggcctaccgcatgaagcgcaacggcgcgggactgccctccaccagcattctggccaccatggtgctggtgatgctgtcctcctctgcctgtctgtacttcggcgcggaggacagtctaaaggccacgtacccccacgagtttgcactggaggtgtggctggagaacagcgctgacatgccgaaattgcaggaggctctgaccaaagcgggcgcggcctatggcgtgaacgtctgggagaagggcactgtggaaccggggagcggcaatacgtggagcgccgcctttgacaccggcctttcccaagagcagcagctggcgttgagccgcgccattgacgaggcgctgggtgacacggacattacgtggaactacttccgctcctaccgggcggaagctgctgatgatttttacggcacctacggcagcctgttctttatcggcatcgtgctgagcgtgctgttcatctgcgcggcggtgcttatcatctactacaagcagctatgcgagggatacgaggatcaaccccgtttcgccatcatgcagaaggtgggcatgacggcggcggatatccgcaggagcgtcaattcccagctgctgacggtgttcttcctgccgctggcgggcgcggcgctgcacatggcgttcgcattccccatgatccggcggatgctgctgctctttgagctacacaacacgggactgttcatcgccacggcgctggtcagcttcgcggtactggcggtggtgtacacgctggtgtacaaggccacgtccaacgcgtattaccggatcgtgaagggtagcgtgtga

SEQ ID NO: 200 - DNA, 1332 bp, Unknown
  Unknown gut bacteria
atgcgtatttgcaaggagagcgtcactatgagcaccgtcatcacgtctatcgacccccattccccggcggaaaaggccggaatcgttgtgggggagcagctgctggagatcaacggccaccacatcgtggacgtgctggactaccggttttatggctatgaccctgtggcggtgttgcgtctcagcaaggacggccacacccgcaccgtcaccatccgcaaggaggagggccgtgacctgggcctgaacttcaacacctatctgatggacgagatgcaccagtgcgccaaccactgcctgttctgcttcgtggatcagatgccgcccaacatgcggccgtccctgtacatcaaggacgacgacgagcggctcagcttcctgctgggcaactacaccaccctgaccaacctctcggagcgggaggcacagcggatcatcgacctgcacatcagccccatcaacgtgtccgtccacgccacggagccgcagctccactgtacgctgctgggcaacaagggagcggagcggtcgctggaatacatccggcgattctgcaaggcgggcatcgtcatgaacggccagatcgtggtgtgccccggctggaacgacggcgacgctctgcgtcgcacgctgcgtgacctgacggactggcagttttccagctgctcgctggtgccggtaggcatcaccaagtaccgtaagggccttgccaagctgcggcctgtggacagcgaatgcgcgcgggagatcatcgccattgccgaggagtacgggcaggagaacctgcggcgctacggcacccggcggttcttctgcgccgacgagctgttcctgcgggcgggactgcccctgccggaggaggactactacgagggctaccgccaaatcgaaaacggcgtgggcatgctgcggtcgctggagcaggagttcctgtccgccatgaagctggaggagccggacgccgcgcccagccccttcaccatcgccaccggcgtggccgccgcgccctttatgcagacgctggtggacgccgccaaagcgtacttccccaagcttgacgcggaggtggtggccgtggagaacgacttcttcggccgcaccatcgacgtggcggggctgctgacggggcaggacatcgccaagcagctgcaaggccgggtcactggccgccgggtgctgctgacggtgcatatgctgcgccacggcgaaacggtatttttagatgactatacggtggacaggctttctcaggaactgggcagccccgtccagatcgtggacgacgacggcggctcgctgctggacgccatgctggaagccaccgtgggataa

SEQ ID NO: 201 - DNA, 414 bp, Unknown
  Unknown gut bacteria
atgcttgattacgatctgacccgcgcagagcaggtcagaagaacggatcttgcgcaaaaagcccgcaggatgatcctgtcccacatgaaggtggaggcggaggacgaaacttcgctgacgctggatcaccgcggctactatatgcagatctcgttctcgccgctgcacccgctgctggtcgtctgcctggctaaggcgatccgaaacccggatggcgcacgaaaacagcagcttgccaacgagctgaacctgcacagcgtgttgggcagccacgccatcaacgaggacgtcggctgttattcctatcgcgctacccactggctggatacggagctcacgccggaacggttctttgaaatactcagccgctgcgttgacgaagcggatcgtggctatttcaatctggcaggatga

SEQ ID NO: 202 - DNA, 1131 bp, Unknown
  Unknown gut bacteria
atgattaccgttcggccgggaagtcatgtgcatcggcttatcacagtgctcgggctcgccggcgaataccctgtccgttcgcttggcgtgctgggaaacgagcgtactctcagagcgctggtgagtaaactttccacaacacaggagcttcgtaatccggataccggcgagcggatgagggtaaagctgctgcagctgaccggtactgggaatgccaaagcgattcgtttctgtaagggcgctctccccatactggaatggatacatccggacgcatacggctattatatggccgcgttttacaatcatagattccccggcggtatggcgcatcgggaccgtaaccttcgggttgccgagacgattgggatgcacctgaccgccggtatcgagacaagggcctatctactccccgccttgcaaaaccgggctatccttcggataacaccggacgcgcctgccttctatctggcgcgggatttcaaaaagatcaccccagcggaacagaacaaaaccatgttcacacgcatcgtcggcgcaatcttctatcccggcggctgttacgccgtttacaacacacggaacgccgcgatgaaatggaacggcatgggagagttcaaggcgctccacagcctgacagagcttgcccgcatgaatgccggggttcagagcatcgactccgcaatcctgctgggcgagtcctatgatacggcgctgaccacactgctggagtcggataaaaaccggcgactggaacttcgctttgacggcatctatcggcatatctactttgtgcccatgaatgccggcggcatccggcagttcagattgatcaccgtcccagactggaaagaaaagctgcttgagctgctgttcgacccagacgtccggtcatataaccggggatttatggaatacgacgccagtatcggcggcacctgtgttttctcgcatcttgacggcgacatcgcacgcctaatccgttttcgtgaggcaatgcagaccggcgcagggagcttcgaggtactctgcttcgatgatcaagcgccctttctaagagagtaccttggtccgcatatcatactcaaaaccatcgacgctgccacagtagaagcagaactgggactataa

SEQ ID NO: 203 - DNA, 615 bp, Unknown
  Unknown gut bacteria
atggcgcagtatctgaccacacattttcgctatccaacattaaactcctggaacagatccacatcgtatgcttgtaacctaaaaatcacacaccttgggctctcgcccgaggtggtggacaagctgttcgatatgatccagacccaggagttttttgatgccatggacgagtgtaaatgggaatttgctgcgaaacacaactatctctggcaggcagtgatgaacggacgaagcggcgggtatctggttctctatcagggagaaaagcacccgagcggctacaagtcctactgcactaactgcggacagaggaattaccagcttgctgcagatggcaactgcacctgcggtgtctgcggaaggcccactcgggtcaatttctcgcagacccacatgcaggtggtaacttatccggggcgtggcactgacgacggcgaggatttcgaggactggagcatgcacgcgcttcgtgaacgtgtaaaactcgtgcaggagctggatcaactggcagaccgtatggttgagctggcgctccggcttacaagagaagcacaggtcattgaagaggagtatttccttccgcagacccgcaaggtgctggtcacgaccctataa

SEQ ID NO: 204 - DNA, 753 bp, Unknown
  Unknown gut bacteria
atgcaaaacaaaaaattcaagcgccacatcgcctatgaggttttgaccatactggggacattggctctgctgctttttgtttgcaggctttggccgattctcttattggtgatactcggtatttttatcgccgccatgcgactgctctttctctctgccagaaaagtggagaatatcccgcctctgcttccggctgctcgcccagaacctacggatcaggatatccgggacatggcgttcggttcaatgcagcggcggattacagagctggtcacggccgatttccccaacgccagatgggtatggaagacacctaatgccatacgcaatattgcgacaggcaacgaggtgcgaatcctgctcaaccatgccggcggataccgtgaagcgatcgttgtgattcgcggccttcaagtgtgcagcctgacctacccgcacgcggaagaagtcaagatgccggaaacggaaaatgatgagacgggcacagaggaaactgagaatgacactccgcagaaggtcgatcccccggagaattatgagtatctggcttttgaatgggtggacgcccatgttatggaactcaatgagcggtgcaacgagagcatcgcgcaagggctatccatgctggaaataacggcggcagaactgcctgcacgagaaagctggccggacatctgccgggagctggaacgaaacggtatggagaactgctgctgtacagataccggtattaccgttgatttcacgcagtga

SEQ ID NO: 205 - DNA, 1134 bp, Unknown
  Unknown gut bacteria
aaaatgagtcattttgtaacactggtcaatttttatatgcccgagctggaggaaaactgcgaggaaaatatgcgttatgcggaacagatcgcagaagtcaaagaaaagctggcgcaggacccggagagttttgctttgcggtttcttctgaaacgacttcaaagcaaggccagcactctggaacgttcggctgagtgcgagattgatgagctgatggccccattctgtgaaggaacggatgacccggcctatctggagtttgaggatcgaaccgatgacctgcggcgggattatgagaccgacaaaatcaactgtgtccgttttccggacggaactgtcgttccggagtacaaccggctgttatacgaaaaatatctcatcaaagatggcaaggtgttccagaaaaaggccgggcacctcggccatgagaagcgcacgaagaaagcgaaaaagacgcgcgcatttatgggatatccggtgaagaagctctatcccagtctgaagcagtatgcggaggactactgtggttatacctatgacagcaagaacaatacgtatgggtattactgcaatccgaatgccttctgggattggtattccattggtggccgctggccgttccaattccttgtccgtgacacagcggaacgaattaacggtgagcgcacatggggcaacgaagatgctgtatgtaaagcgcccgaaggctatatatgggtctgcggcgcaagaaaaagggatattgcatgggatctcatgaaggaatgggagctacagcacgccaaaaagcgctttaaacttcttgcagagacttttcgttccggcaaggctccggaaggcagcttctggaagatcacggaggatggagttttctcttttctgacgcagatctatttcaagaatgaaagcgaggatgcctatctccgccgcaacggactcgcaccggatcagcgcatggtgcccggcgcctattccttccttcaggacggagactggcactccaagggagatatgggctggtggggtatcagcagcaacgataagaaaccggacgcatggaggcagatgttggcagactacatagacagcattcctgacgatcatttcattgtcgggattgactgccatatctaa

SEQ ID NO: 206 - DNA, 372 bp, Unknown
  Unknown gut bacteria
ggttccgttgtgaagcgggatgggaaataccgtttttcgctgcagttcggttcggaaacgcgagaacaggtgcaggcaggagagcttttagagcgtcttggaaaccgaaaaagcgcagttgtcatagccgcactgaatgcatatattgctgcacatcccgagcttgctgaacctgcgccggtaagtgttaaaattgacggcgggataaggcgtgaggcgcttgagcaaatgattcgatccattattgacgagcgaatcgcaaacggtcagttgcttgccggaggcgttgaaacaccatctatacaaatgcaggaagatttgaacgtggacattgcggcaatgatcagtaatctggagttgtttgatggttga

SEQ ID NO: 207 - DNA, 516 bp, Unknown
  Unknown gut bacteria
atgacgcttacacaaccccagcagagaaaagtggagcaaaacctcgggctggtcgggaaggtgatcaaggacaaggtacataatcccggtcaaaacagtatctacagttacgatgacctctatcagatcggctgcattggcctctgcaaggcggcatacagcgataaaggcggatgcttctctacgtatgcatacaggctaatctggaacgagatatgcacggcgttgatctatgccaaccgccgggcggcaaaggagtgcgaactgatcccggaggtgctcgggaaagaagatagtttagacgagcatcacgaactgagtatgatacttgaccgactggaggccaacgcttccgaggcgatggcgaaaggcatccgggcgatccgtctcagcgccgaaggctattcccacgcggaaatcggcagcatactcggggaaagcgacaaatgtgtcgccgcccgaatctcccgaaccaggaaatatctcaggtcgcatccggaccttgcggcattctga

SEQ ID NO: 208 - DNA, 1806 bp, Unknown
  Unknown gut bacteria
gtgcttggccaattgctgataaactacgagctttggatgaattccggcggtcttacagggcaaacgaccatcggcgccgtagactggaatccgatcgtgtgtctgggcagcgccttcagcatcccggggctaaaaagcatcggtatactgctgctgaccggggtcggtatcacggcctatgtgcgtttccacgataaattcagctccaaggactacgatgagcgcggatttacccgcagcaagtacggaacctacggcaccgcatcatggatgaaggacaaggaactgaaagaaattctggagatcaagcctccgtcgcaggccgatggcatcattttgggcgaaaaaaacggcagcgtcgtctgcttacctaaagacaccagactgaaccgccacatcgccgtattcggtgcatcaggtacccggaaatcccgtggcgtgatccgtccggcgctgttcaccatactcaagcgcggagagtcggcagtcattacggatccgaaggcggagctctataacgataccgccgagttgttccgcaagaacgggtatgaggtaaaagtattcaacctggtagacccccggcacggcgactcatggaactgcatgtcagacctgaacggcgatactctgctggcgcaggtgttgaccaatgtcatcatctccaacaccagtgagggcaagggcgaccatttctgggacaacggcgaggccaatttgctcaaagcgctggtgctctatatcgatctggacaggagccgcagcccggagacgaagaacctggcggccgcctaccagctcctgacccaaaacagcgaacggcagctgacggcactttttgaaaagctgccgctggatcaccccgcccgtgcgccgttcaatcttttctcgcaggccagcgacacggtgcgttccggcatcgtccttggactcggcacccggttacaggtcttacagaacgaggctgtgcgggacatcatcagccgcagcgatatcgatctcacggcgccgggcaagcgcaaatgcgcctacttcgtcatactcagcgatcaggacgcaacgatggcgtttctgtcctcgctgttcttttcgtttctattcatcaagttggtgcgctatgccgacagcacgccggagctgcgctgcaaagtcccggtcaacctcatcttcgatgagttcaacaatgtgggcaagctcggcggcgcagcggacggttcggatttcgcccgtacgctcagcgttatccgcagccgtgcgatctatgtgatgctggccgtgcagagcctcggtcagctccagaaccggtatcccaacaatctctgggcagagatcgtcggcaacctggacgtgcagcttatgctgggctgtaccgatgaggtcagcgccgaatacttctccgcgcggagcggtgatatgtcggtggagatcaactccaccatgaccgtgcgcaagaccattgccgtagcgcaggtcatcccccaataccgtcagacggagggccaggggcgcagacggctgctgactccggacgaggtgctgcgcatcccaaacgaggaactgctggtggtcatccgaggacacaatgtcctgaaactaaaaaagtttgattatgctgaccacccgctggccaaggaattgactcccgtcagcattcttgactacacacccccgcacgcggcagcgccttttctccagaccgaaacgacttcgccacacgcagcgcctgaggagcggccgcacacatcgtccataccctcaaaacgcagaactctgtacagctccgcaaaaccgccgagcgagttttga

SEQ ID NO: 209 - DNA, 1056 bp, Unknown
  Unknown gut bacteria
atggacatctttcatatgtcagatatcattccgctgattgggcttccatacccgccatacggaagaagcaactacaatgtgccctgcccgtgttgtgatgacgagccgcacgcaaaacatctcaacatcaatctgcagaaggatgtatttcgctgtccgcgctgtgggttctccggcggcattttcgacctgtatgcatactatacggggattgcccgcgaggaggtccgtgatgctctgattgcacgcttggatgtgcagggcagtataccgaagccggagcacattcctgtgcccgtggttgcagaagtcccaccgacagatattttatcacgaagcgacacctataccgggcttctgtccaagctgacgctggcctccgaccatcggcagaacctgcgaaaccggggcctgtcagatgaggaaatcgacaggcttgggtaccgtaccactccggtggtggggatgcaaaccattgcaaggcagcttcaatccagcggatattatctgtccggtgttcccggcttttaccgaaaagacgggaaatggtcctttgcctgtgagagccgcggtattctgattccggtgcgagacagtaaaggccgtattcaaggcatgcagattcgccgggataatgcgacgcggcgcaaatttcgctgggtatccagcaccggccgcacagacggctgtaaggcagagggttgggtacatattgcgggggaaccgcgcgctatggtgctgctcacagagggccccatgaaagcggatgtcatccattacctgacaggacagacagtactcgcagttgcgggggcaaatgcattgacccaattggagcttatcctgccgcagctgcatgagcaaggtgtagaacgtatcatgactgcattcgacatggatttcatggagaacccccatgtgcaaggcggatacaggacgctggtctcactgctttcggatgcaggctttcgctatggcacctatctgtgggatccccgctacaaaggtcttgatgattatgtttgggagcactgcttccagcggcaattatcttag

SEQ ID NO: 210 - DNA, 609 bp, Unknown
  Unknown gut bacteria
ttacaggaggtcattatgaaaaagatgaaaacaggcatcggcgtaatgctggcgctattgtgctgcatcctcatgtgtacaggtgttgtctatgctactggcgatgacacggacggcacggagcttcaagtcgcgcagcccgtcatccttgaggtacagcttggcccccaatgggcgggtgttgaattccagctcaagacggatgcaggcctttatccgggcacgattgccgtggggcaggacgggattttacgaaccgagctgggcaatagcggcagctacgtcctttcttgcctgactctaaatgccgccgtgccggcgccgggcgatatcccaagtcctgatgtgacgcaacaagaacaggagccgctgacaacagacagtgcagagaacgcggacgccgcttcgcagaatgtgcaagaacaggattcgggccgtcctaccgtcggcgggattcccgtgatgcacattatcctgtttggcggagggctccttcttgcggcaggttcgctggtcgccatgcgctttattcggaaccggcgcccatcagaacgctcgccgtatgatccggacgatgaggacgatgacgaggatgaatacgaatattga

SEQ ID NO: 211 - DNA, 2115 bp, Unknown
  Unknown gut bacteria
atggacgcggcggggaatgtggtttctgagatcaaggcggtgggttattgcctgccgacggcagataatctgcgctatgatatgcgcggacgttggagccggagcgccaagcatggcatccaatttgaagtcgagggcttcgatgaagtgattgtacccagcaaggaaggcgtcatcgcttacctgtgctccgggcagatcaaggggatcggccctaaaaccgcggaaaagatttatgccatgtttgggcagaacacgctgaccgtgctggatcatgagccggaacaactgcttgccgtgtcgggcatcagcaaaacaaagctcaaaaagatttgcgactcctaccttgcctcccgcggcgcacgcgatgtggttgcctttctggcgccacatggtgtaacgcctaacagggcggtcaagctgtacaagcagtacggagagcataccatggacatcgtcagaaatcacccttaccgtctgtgtgagatggtgggcatcggctttaagacggctgaccgtattgctgtcagcatgggctttgaccctctttcgccggaacgtgtggatgaggggctgatattcacgctgaccgatgcagagctgaaaggacatctgtgtatggaaaagcacagctttctcaagcaatgtctgaagctgctggataccgaagggctgacggaagagatgctggcggtacgggcttcaagaatgcttgagtccggccgcttggcctcctacgacaggcaggtataccgcgcagtcacagcgcgaacggaacagagccttgcgtgggccgtttacagaatgcttacttatgagaaagcggggtctcacgtcaacattgatacggagatctccgcagaagaaaaaaagcagggtatacagttggcttccgaacagcggcacgcagttacgacagccctgacatcacagctcagtgtgattaccggcggacccggcaccggcaagacgctgatccagcgattcctgctggatatctatcgcaggaaaaaccgcggagcaaaaattatctgctgtgcgcctacaggacgcgcagcccgcaggatggagcaatcgaccgggttcccggccactaccatccacaaagcgcttgggcttctggccggtgaggacggcgactactgtgaaccggagatgctggatgcggatctgattgtagtggatgaggtgtccatgatggatatctatcttgccaaccatctgttccgctccgtaccgcacggcagtcagcttgtgctgattggcgatgcggatcagcttccctctgtcgggcccggcgccgtgctgagcgagatcatcgcctgcggcgctgtaccggtagtgcggctggatcgcatattccggcagagctatggtagccgtatcgccgctaatgcaaagctcatccgacacggaaatcttagcttggaatacggcgaggatttccagttctatgactcctgtgacatgagtgcttccgcacagcagatcgagacactgtacctacaggaaaccgccagatacggtgttgacaatgtggcgcttctaaccccataccgccaaaaaacggagacgggcgtgaatgcgctgaacgagcggcttcgggaaaagctcaatccgcaggacgggaaaaagccggaggttgcatacagaaagcggatataccgtttgggagacaaggtcatgcagataaaaaactgcgaggacatcagcaatggtgatatcggttatatcacatccgtcacccgcgatgacaccgacagcgtgctgactgttgacttcggcgatggccgaattgccgagtatgacggcagcgaccttgaaatgctggatctggcctacgcctccaccatccacaagtcccagggcagcgaatataagtctgtcatcatcaacctgcagtgcgcccatgcggtcatgctggtgcgtccgcttgtttatacggcaattacacgcgcaaaggagcgcgtgctgatcgtaggagagcggagagcattatgcattgccatcaaacgtacagatacggaacagcgcgggacgatgctctcggcgcgaatcaaagagctaatctcaaatgtgaaaggagatcattacaatggcaacttggctcagtga

SEQ ID NO: 212 - DNA, 3114 bp, Unknown
  Unknown gut bacteria
atggccaaagcaaaaggaaaaagaaaccgcagaaaagaaaagcttgagtttgtacaggattatttgcccatccgcgacctgaaaaacgggatcattgaaacgacggacaaccgctacataaaaatccttgagatcgagccgatcaacttcacgctgcgatccgatgaggagcagttcaacatcatctccagctttgccagctggctgaagatatcccccatgcggctgcagttcaagtccattacgcgccgcgcggactcggataagcacatatccatgatctgcgaggaattggaacacgaggagaatccgcaatgtaaggagcttggcgaagattatatcggactcatcaaggatgtgggaaatcgggaagcgctgacgaggcgcttctttctgattttccagtatgaggcggtaggccgcaacgaaagcgacgactatgcaaaaatctatggcatgctccagaccgccgagcagacagcacgggcgtatttcatgcaatgcggcaacagcatcgtccagtccaaagacccggatgaagcgactgccgaaatcctatacatgttttacaaccggcgctcctgcacggacgagccgttttcctcccgtgtagatcgcatcgtggtggacaccatggcggcaaagaagaaaatcatcggcatggacccggtgccgcctatccgtatggccaactttctggcgccccgcggcatcgacctgagccattataactatgtcgttatggacgggctgtactattccttcctctacatcaaggcgggcgggtatccaagccgcgtccgggccggctggatgtcctcgctcatcaacgccggagaaggagtggatatcgacgtccatctccgccgtgagaaccgcagccgcaccatagataaggtcgcccagcggatcaggctcaaccgcaccaagctcaagagcatgcaggataccagcaccgattatgaggagctgaccaattccatacaggcgggctattttatcaagaatggaatcgccaactacaacgaggacctcttttacatgagcgttttcatcaccgtatcggccaaaacctacgaggaattgctttggcgcaagcagcagatggtggatatgctcaaatccatggatatgtacaccagcgagtgcagctttcagcaggaggccgcactgcagtcggtgatgccgttcctgaaaatctcgcccaagctggagaaaaaggcgcagcgcaatgtgctgaccagcggcgccgcatccagctatatcttcaccagctttgagctgtcggatgacaatggcgtgctgttgggcatcaatcgatacaacaactccctgtgcatcgtggatctgttcaacacaaagatcaataaaaatgccaacctgaacctactgggcacatcgggcgcaggcaagaccttcaccatgcagctgctggcgcttcggatgcggatgcgcggcattcagtgctacattctggctcccatcaagggacacgaattccgtagagcctgcaataagatcggcggcgagtttatcaagatcgcaccggggtccccccactgcatcaatgtaatggagatacggcataccatgtcgccggagatggagctgattgacgagatcgattatgtggagatgggctccatgctggctcgaaaaattcagcagctcatgaccttcttcggcctgctgatccccgatatgagcaacgaagaggaacagatgctggatgaagcgttgatccgaacctatgcggacttcggcatcacccatgataacgactccatctatacggatatggcctccgctccgcccaaaatgaagcagatgcctatcctgggcgacctgcataagcacctgcaggagaatcccatgacccagcggctggcggccatcatcagccgttttgtcaccggcagcgcccaaagcttcaacagacagaccaatgtagacctctctaatatatacatcgtacttgacctgtcggagctgaagggcaagctgcttccggtgggcatgttcatcgcactggattatgtgtgggatcagataaagtccgaccgcaccaaacgcaaagccatctttatcgacgagatctggcagctgatcggcgccggcgccaaccgcatggccgcagagttttgccttgagatattcaaggttatccgcggcttcggcggagcggccatttccgcaacgcaggatctgtcggatttcttcggtctggaggacggcaagtacggcagggcgatcatcaacaactccaagaacaagatcattctgaacctggagccggacgaggcccgctatgtacaggaaacgctgaagctcacccgcacggagatccgcgccatcacccgcttcgagcgcggcgaggcgctcatcagctccaacaacaacaaagtgcccgtggtggtgaaggcctccaagctggaaaaggaaatgatcaccacggatcgtgccgaactggaggcaatcctcaaagaacggcagagggagaatacgcatttcgcaaagaatacgcacacacagaaggaggtgaacaatatgctgcttgatgatgagcgccatgtgatcaaatggttgtcgcagtacggcgcactgaccaaaacacaggtgatccgactgctgcgggacaaaaccccggagacggcggagaagattcttcgcaatctgaaaagggagcatcaaatctcggatgtggccggtggctactatctggctttggatgggctatgcaagccggatcagcggacgatccttgccgtatgggtgctgctgcgctttatcgactatgtggatcccatggcgcattatcctgcggtctacccgtcccaaatcttttttctgaaggaaaacaccggctatgagatcgttgtgctgtatgacggcgagcagcaccttagcaagctgctgcagccgcaggatgacgagatgaaatatatctttgtcctgcccaatatcgccatggcgtcccagatgatgctccccaaggcgccctgcctgtttgcaaccgtcaactttgccgggcaggaagaaccggacattacattttacacagaggaggctgcaaccgatggactcgataaactcgttcattcatctgctggataa

SEQ ID NO: 213 - DNA, 936 bp, Unknown
  Unknown gut bacteria
atgggaggtactcttatgttgatcgccattgatcatggaaattatgccgttaaaaccccgcatttctctttcatttccgggctgacagaacacaccgtaaaaccgcctatggcagaggaggttttggagtacaacgggaaatactggtcgctcaccgggcagcgcttgccctatatgagagacaagaccagagatgatcgatactttatcctgtcgctctttgccattgctaaggagctttccgctgccggtgccaatacggcgtttgagcagatcgaccttgcggttggcttgccgccggaacactacgggatgctgagagaacgcttcgcgcagtatttcaggcggtttggaacagtgaattttgcttacaacaaccgtcctatgagcattgtgatccgaaatgtctttgtgtatccgcaggcgtatgccgctgttgttcctcaaagcggacagctattgaaaacgctgcggatgtttatcgtggatatcggcggatatactaccgatgtgcttctccttcgcaacggaaagccggatctgcaattctgccgcagtttagagagcggagtcatcaccatgaacaatgatatcattggcaaaatcagcgcgcagcacgacatgcgcattgaagacgagcatatctgtgcagtgctgcaggggcaggaaacgatactgccagatgaggtaaaaaaggcgattcgtgatgcggctcagctgcacgcaaaagatattttgggcaagctgcgtgagcttcaggtggatttgcgtaccaatcccgccatctttattggaggcggaagcgtcctgttcagaccgttgattgagcataccccgcttgtggcgaaggctaccttcatcgaggatccaaaggcaaacgcgatcggttatgagatgcttgcgcgaggacagatggccatgcgcacggtacaataa

SEQ ID NO: 214 - DNA, 1881 bp, Unknown
  Unknown gut bacteria
atgagcgtatcaatcaacaatctattcaactactcccgttcgctgcccgtcccctttgataccatgacaaataagaaggtcaaggtggcatccatgtacggggcaaagacggaatcaacgctatgtggttctgtgatcaaggcagtccacgccatgtgccggtgcatgaacggcaccggggaaggtgcggtcggccagatcgatacaaacaaaagcgtggcggagtataaatcctccgtcggtccggatgcctatcatcttgtggtgttcgatgcagcctccggcagcgctttggcaagcgtttatgacaaaaacaccgagctcatcgagcagtacgtggcgcatccgagccagcgggacggcgcagcaatcttctttgccctaatgccgttcctgatgtcagatgcggagttcgatgaaacctttcaggagtactacgaccagttcattgccggatacccggatatggcaaaggcgaccgaaagcatggcaatcctctgcgacaatgcctaccgcagaatcaaggacgatacctgcccggcgcatatcaatatcacagtggacaagtccggaaacctgatgcgggtctctcaaggtcagctggattccggatcctttgtgcccaccagcgtcacagccggggaattcacgatctttgccaagaccggaccggccgttatcaaaaaagccggcgtcgtggtggagcatacggatttcgtcggcaagtatcccctgacgccgggacgcaccttgagcgcgttggagctgagcctgattccgaaactcccggaatggtatatcattccgccggaagtggtggatatttgcaagcatgcgcagaagaccaccgggcggcccatgcagatgcgaaacttcctgttgcgtggacctgccggtactggcaagaccatgggcgcaaaagccattgccgccggactggggctgccatacatgaagtatacctgctctgccaacacagaaatatttgatttcaccggcatgatcttccctgaaacggacgcagtgtccaccggtagctcggagcttgaccgtgagcgcgagatcctcaagtccatgggaggtatcagctatgccaatgtagcaaagcttatgcgccttccggacttggatgatatggactacgatcctgccggcgtctatcaggctctgacaggcgtggaaaatctggcggctaccgtgcaggactgcatgagcgttgtgctggaaaaggtcacggaaaaggtacaggctcttagcaagcgtgctgaaaaccgtcaaagctccggccagaactatacttatgtggagacggattttgtgaaagcgttaaaacatgggtatttagtcgaggttcaggagccgtccacgatcattcagccgggtgtgctggtgggccttaactctcttctggagcaggaggggtctatcacgcttccgaccggcgagatcattcgcagacaccctgatacggtcgtcattgtgacgaccaatgtcagttacgaaggttgcaggtcgatgaaccagtcggtggtggacagaatgagtctggtcaaggacattgaactgccggagcccgaggttatggtgcagcgagccatggccgtgaccggatgtgccgacgaatacctggtatcccagatggtgcaggtggtcaacgacatggccgattactgccgcaaaaacagtatcaccgacggtgcctgcggaatgcgcagcctgatcgattgggtcatcagtgcagagatctccggcgacccttatctgtcggcaaagtatacggtcatcagcaaagccactgccgacgaggaagaccgggaagcactgattacaaccattctggaccctatgtttgccccaaagcggaagcgaacatcggcataa

SEQ ID NO: 215 - DNA, 1101 bp, Unknown
  Unknown gut bacteria
catggcgcgggcgcttacgctgaggtggggcgattacgaccttgcgaaggcggtgagctactgatgtccgctccgattattctctgcgacactgcaggcatgaccaacgaacgatggttggagtgccgcgcccacgggcctaagggcaccattccttatacggtaggaggcagcgatgtggctgctatcttcggcgtatcgccgtggacaacgccgctggagctatggatgatcaaaaagggccggatgaagacacctgtgaaatccaatcaggagcagctgataatggggcatcttctggaacctatcgcggcctattggtatcagcaaaaaaccggcaatacggtttatgacgatacctatatgtatcagcacgcagatcacccgtgggctcttgcgaactttgaccgccgctttacccgtaaggaggacaacgctcccggcattttggagtgcaaaagctgcacctatcacaaagccggagattgggctgacgatgcctatcccatctactatgagctgcagcttcgcttctatctggctgtggcggatgtggagattggcgcgttttctactatttggggaaacaatccggaacatgatctggcaatgccggcgcttacccgtgaccgagccaaggaggatatgatcttccagcggcttgaggaatggatttggagcttggagcatgacaagccacctacgatggcggatgtcaagccagcactggcactggaatccctggcgcgcatttacggcgccagccagcccggactccccacgattgaatttcctgcaaagtatgagaaggcgctgcgccagatcgcgctgctgcaggggaaaatctccgattgcaatgcggagatcaaaacctatgaaagagagatcgctgcacacagcgtgcgaatcgcagaattgatgcaggcgcatgagcatggcgtactgagcacgaccggcgacaagctcctcatcgattttgtcaccaaaacaaccaaacgtcccgactcgaaacttctcaaagagaagtatcccaccgtgtatgcggatgtgctcaataccagtgagagccggaaactaaaagtatcggttacaccgacataa

SEQ ID NO: 216 - DNA, 360 bp, Unknown
  Unknown gut bacteria
atgtcaaagcaacttgtatcaggtaagcatcggctcagaaatacctactggtcgttagtgggcgccgcgtcggcaacgatcctctccgtccagcccgtaatggctgaaacaatctgggatcgcttttccacgatcatgcgggatatctatggacagctggtcgggatcagtaccattgtcgccgtgaccgtggcagccattgcgttgttggtgcggatggtcagccggaaccagcgtgcggtggacgaggctaccagctggctcaaacgagtcgttgtgacctggattattcttaacacactcggctttatcgtagcatacctgcagccgttgatcgccggcgggcagtatacttggtga

SEQ ID NO: 217 - DNA, 693 bp, Unknown
  Unknown gut bacteria
atgtgcttacgcggattttttcttgcactcacgaaaccggaaaggagaatcgacatgagaaaaatagaaagcagtgccggaaaggcgctttatgaacagcaggaaaccaagctttcgcagcaatctgccgcatttattgagcttctaacaaagcgcggcattctgggagatttgtctatcgatgatgacagagtccgccaagccaaaaaggagaaaaagaaaagcatgtatcataacacgcttctcctgctgcagcactaccgaaccattctctggacgctggaatgcttcccgtccagcgtagcagaggagctggatcgcccgctgaaggatctggatacgctgctggatcggatcgacctggaacttggaatgaacaatcgaaagctggaaggccggatggagagtgtacgccgctcccgcctgctggttgaccggctcaacgatgcggtcagtatattgaaagccaaaccggtcaacgggcacaagatgtatgacatcatctacatgacctttctcgggccggacaagctgatgcacgaagagcttctgtaccgtctggacatctctgcccggcactattaccggctccgcacgcaggcaatcaatatcatcgccctgcgcctatggtctgcccctgccggcgaggtggattcctggctggaggttctttctattttggaaaactggtaa

SEQ ID NO: 218 - DNA, 2271 bp, Unknown
  Unknown gut bacteria
atggcaagagtgaatcataagcgggttaaacagctgctcaatgaaaaacgcagcagaatcacagaccggcaattcttcacgtcccgcatccttgcgggacattttgaagatatggccatggcacagacgcggcggtataaatacaaccgccgcatccatgtggccatcagctggagtccgaagtccggtgaagtggcatgcaccaataacctgtcggtgctgatcaatgcggggcataggctggtgacccaaaacagggggcgggagaaccgctatgagatcgtttgcggactgtttgcccacgaacttgggcattgtctatacacggactttcttgcgggccagacctacaacaactacctcagccgggagaaatggtacccggagccgcctgtttacaagctgcccaaagacactgtaagcgaacgagcgctgtgggagtatgtaaggctggagccgcggaacaatgagatgcttcgctatgtcgcgcaccatatttccaatgtcattgaggacgcctatatcgaaaatcggatactcgctcaattccgcggcacgctgggcaactgcctggaagcgttacgggagcagcagtatgagagcattccgacggtaacggagcttatcgagaaagaggatgacgggaactgccatatctttgagagcatcctgcagatcatgctgtcgtatgtgaagttcggtgaaatcaagtacggagatgctcccctcagcgatgagcgcattcaggtcgtgttcaaactgattcacgatctggacgccgccattgtcaatccctccggaaaagaacggctcaaggtcgtcaatctcatactggttcgctgctgggactatatcgaggatttcctggagatctgcaaaaagcgccaggaggaggccaaggcgtccggttccacagagtcgctggccgagaccatcgcgcagattctgcaggcaatggccggaagctctgtgtccggcgagggcagcagcacaccgatccccgaagtgggtgcggtctgtgtggcagccggagctgggaaacgggcgcagacggcagctcaggcagaaaaaagcgagtctgaaggaagcagcggctctgaagagcccgagccccagactgaccccgaatccgagcgttcttctgccgggatctcccagaccgaaaatccggcggaagaaggcgcaattcccggagatatggaaggcgcttccggtgggaagcaggcagtatcagcggaagaagacggacgcatcccctatcagcagacagatcgtgtttccgaaggcagcggaggggcgaccaagcacaacgatgcatatgagcgtgaacgctatgaccatgcagcggaggacattgagcgcctgctggacaagatggcggagaaggccgcctgcgagcagctggagaatgaacggacacgggaactcaacgatgtggcccagagcatctcctatggagatgtccatgccggtgttgatatctgtgtgaaccggatatccaccgttgatgaggagcttgtagagcagtataacgccatttccgggccattgctggatatctcacggcagctgcagaaaagcctcttgcagcagctgaaggataaacagcgcggcggcaagcagaccgggctcatgatggggcgacggctggatgcccacgccctctgccggaacgatgggaaggttttttataaaaatgccctgcccaatgaaattccacagatgtccgtagggcttttgctggacgaatcaggcagcatgtgctcctgcgaccgctgcacctacgccaggtcttcggctatcattctatatgacttctgcaaggcgctgcatatccctgtcaccgtttacggtcattccaccagcggcagcagtgtggagctgtattcctatgcagagttcgaaagcatcgataacgatgataaataccgcctgatggacattgccgcccgtggcagcaatcgcgacggcgccgcgcttcgttttgtggcggagcagctggttaaacggccggaggaggtaaaaatcctgattcttgtatccgatggtcaaccggcagcgcccggttactacggcagtgccgccgaggaagatctccgcggcatcaagcaggagtaccggcgcaagggagtattgttcattgcggccgctatcggggaggacaaacagaacatcgagcgaatctatggtgattcctttatggacatcacagatctgaatcaactgcccgtaaagctgaccgcagcggtcaagcgccatatgcgggtctaa

SEQ ID NO: 219 - DNA, 705 bp, Unknown
  Unknown gut bacteria
atggactcgataaactcgttcattcatctgctggataaaatagagacgcaggagcgacggctcggcatgaccataaaaaatctccgctgtctgaccggagggaaaagcatggagctggcgtatgccatggcgctgaagctggctgaggaaagtgaaaaattgacgctgctgaccagagcacttcccgcctacacgggaaatccgcgggcactgcaggatgtggatgcggttgcagcagagtcggttccaatagaagcgggctttaccatcgaaggctggttctgcatccggctgcctctgctgctccccaaaaaggagaggagctccgcctcctatattcggggcatcctgtaccccgcgctcaggaacttctttcagggcaaagcgccggttcgataccccgaaagcattatgatattccgccatgtatatgaaaaaggcaggccggagcggcggtaccgggatcatgacaatattgaggtcaatatggtctccgataccgtcgccatgtatgtgcttacggatgacgcgccgccgtgctgcgatcatttctactgcagcgcggcctccacgcaggagcgtacggaggtgtatgtggtcctggcacgggattttccccagtggctggtgctggagcccctgatcccggacgagggggtgatgctccatgaaaatgtgccggagcggcgtcaaaaacatgtgtaa

SEQ ID NO: 220 - DNA, 1236 bp, Unknown
  Unknown gut bacteria
atggcaagaaagaaaaaagagatacccaagtatggcactgtggtgctaaagggggtcgaatattacagaacacgaattgaagatgccgatggcagacgagtcgccctttacgcaaggactccggaagaacttcttgaaaaagtggaagaagcacagcgccaaattgaggatgcggttttccgtagaacaacaccgactgtagccgaatattgtgagcgttggctcaccatgcaatctgcaagaatacggccaacaaccctcatagactatacttcaaaggtcaaaaactatatcattgaaccgctgggccataaatatatggcagaagtctcttcagatgatatcaagcttgcgatggtgaatgtctcctcaaaatcatgctcagtatatcgctcggttcagatgctgtataagtgcattttctattctgcagtcgaaagcaaaatcatcgattcctgcccctgtgaaactctttcttccaaaggaggaaagccgcagaatgaacgagaggcacttacagacgaacaggttgataaacttctcgttgccatcaaggggcttcctccgtatgtgtttgtaatgattggtctgtatgctggcttgcgacgggaagaaatcttggcgttaaaatgggactgtgtgtttcttgatgccgaagcaccatacctttccgtgcaaagagcatggcattcggaacataatcgacccgttatctcgtccgatctgaaaacaaaatctgcaaggcgggacattccgctaccttcagttctaacggagtgcctacgggaagcaaaagaggttgcaacttcagaatatgttgttgccaatcgtgatggaggtccgctgtcatatacgcagttcaagcgagtatggcagtatatcgtcacaagatcaacaaaggagcgtacctatgtccggtatatcaatgggcagaaaattcagcgcacggtaacgccgaagttgggagaaaaagcagcgcataatggaaatgtggtgtacacccttgattttcaggtaactccacaccagttgcgccacacatacatcacgaatttgatttactccggcgcagatccgaaaacggttcagtatctggcggggcataagcatagcaaaattacgatggacatttatgctaaggtgaagtataataaacctaaagaattgtcctcggttgtgaacaaagcatttgcgcccaaaaaaggtgctacaccgaataagacgcggaatgggtga

SEQ ID NO: 221 - DNA, 516 bp, Unknown
  Unknown gut bacteria
cgtttccgcattgctcaggctactgaagaaaaagagaatccttctgctgtgaggtgcgtaatgagagaaaaattcgaaaaaatcccaccgccgctgcaaaaacagattataatgagatgtggagccgcgctggtaagccttttattgatggtggtgtctctgttgttggagggcaacctttatctgtctctttccgtcctgctctttttcgccttttatgggttcagtgcattacaactgttgtatagagcagtcaccgatcaaatagtggtaattcgtggtcactgtaccgggctggaaaaaactccgatgcgccgccgcatcaaaacgctctatctgtggtcagacccacatacagtgaaaatacagatcgccggaaaacttcgaaatgttgatgagggcgacatcatcacggtatatacggcaaccggcacaccggtatatgaaaacgaaggctgccaacagcttagcacatatttggcaatcgatattttgaaaggaagaggatcaaaatga

SEQ ID NO: 222 - DNA, 243 bp, Unknown
  Unknown gut bacteria
aatgcgcatatggaaaaactgattacacgaaaagaagctgccaagattttggggattagtattgccacgctggatgcagccagacaaaacggcttgatttcctacgtccagtatgttccaaatgggtgcgtgtattttacagatgcagcgcttcaggaatatgttgccaaatgcacaaagagggcaaaacctgccgataacaacttgacataccgcaagcagcaccgtccccaaaagaaatag

SEQ ID NO: 223 - DNA, 1209 bp, Unknown
  Unknown gut bacteria
atgggttgctggtttttgttatatcacggcgaataccgcctaaaaaaacgaaaggagaacacaaaaatgttacaaccatgccaggacaactactccacgacctttgcttcctacgaggggatgcgccggtaccatgagaagaaatcgctggaaagccgatggcacagatgcagggtcaacgaactgcatattgagccgctggataaggcgtcgcctctttatggaactccgtccgcattcgctgcgggaatcagcgccgagtccgttgaggacacggcggaaaacctcggtcttgccatgcgggtagatggttcttactatcccgtccgcagcacggcctacaaaagcctgttggacagggcgaaaatcagcggatcggcattgacgaagctgagccgccaaagattggcgtcggtgcttaacgattgcctggagctgtattcttcggagacgctcctgcttatccgagatgaaaaaatctcggcagcacactccggcgattccatggattattccgtgctgccgattgatgagctgctgaaggttctgaccaaaaagttggacgaccgtttccccggcagcatgtttcagggcggttatcgcgatcattcgctctccagtgcctcatggactatgcccgggcaaaaggaagacctgctcggtgcctatgccaagctgctggcgtcgcagggaaaacccacacttgctgccaaacttgttcccgccatccgctttgttacctcggataccggcattgcctcggctaaggtttccgccatgctggagggtacgcagcacccgatccatattgggagctgtatcgccgtggaccacaggcaccagagtaaagtggaggactttgaagcagctttggaccagctgtttgcgcagttcggtgattcagtcgccagattacaaaagctgttggatatccatctgagctatccggtcaatgcgatgaccagaatctgcaaaaagttgtctctgccgaagaaagctgctttggaagcaatcggtatgtttgagatggcctatggaggaggaactgcaaccgcccatgatgtgttcatggctatgcaggagatcccctatattctcaaatccgaccatgcaccggagagcaaaatgctcgttgtggaggagaacatggcgcgggcgcttacgctgaggtggggcgattacgaccttgcgaaggcggtgagctactga

SEQ ID NO: 224 - DNA, 423 bp, Unknown
  Unknown gut bacteria
atgctgaaagttggagataaactgatctgcaaaacagaaggacagccggaaacggaattctgcattcgcggcgaggtcaaaaaggtcgaaggagacattgtgaccatcagccgcgcgcttaaattcgggacactgcccatgcacaaggatctgacgctgccggagagcgagctgctgaaatactacacgccattggacaatcaagcgaccgatgactgccccgttagcgggtctatctatgaggttacgatcgtccgcacaggtgtcgtgttcgtaagagcagctacctcggctgcggccatggatcttgcagaccatctcacaaccgatcatgtcaactggtcagatgactggagccccaccgacgctgaagaacgcagtgactacgacggcatggtctttgaggagcctgactttgactga

SEQ ID NO: 225 - DNA, 996 bp, Unknown
  Unknown gut bacteria
atgggttattgggcgaagctggcctcgcgggcggcatttcgcaagggccgggcaaaatactgcggatacacaaacgatgtaatgccgggaatgtggtccggtggcgtggtcggcttgaagagcattctgggcgtcaaaagccgcacggaggctctggaaatcatgaatacgctcagccggttcgggtatatccgttacacgcttgacgagaaaacaaagaagctggaatatgccgtcaccgattgggtcgtaaaatgctccggcaccgaatgcatgagcggaacagtctatgcaacagacggctatggctttctctgccttccccgcaacatcacgcagcgccttgcggatcagcgttatacattcggcgaatcagatgtatggctggacctctggtgccacacggtttggcaggagaccggcaatgcgttttcctgtctggcgcctgccgttcaattcgggagacttggcgccgctttgacattggaagccttgggacggcgttggggctgggaaaagacaaaggtgtggagattttttcagaagaatggggatgccttcgctctgcaccgtctgccgggctcctacggctgcctcattttcaatagactgtatccgctggatacagaggcttcgctgcccaccggcgcagaaattgaacgcattattgagaaaatgcgtatttgcgcaggaaatgcgcatattggaggctcggacaatgcacgcctgaacaagatgatcctttggtatagccgcaggatcattatcatgagaaccactgattatgccgaacaggtatcaaaaaatcgcgttgcactttcgtcccctataatacgcgcgtatatttctctgtgttggaattgtcagaactgtatctatgactgcagaggtgtaagtagtagactacgccgcatagatgcgaaccacatccgcgggccatgtgcttacgcggatcttttcttacactcacgaaaccggaaaggagaatcgacatga

SEQ ID NO: 226 - DNA, 789 bp, Unknown
  Unknown gut bacteria
gtgggcgtgtgcgccctgacccgtgaacctgatacggctaataccgtcggagggaaagatgcatatatgggatacaattcagtatcgcgttgcacctggacggtttgcaatgcgatacttatttttttggaggttcccaaaatgaaaaccaaaagactgacggaaagcgccatgctgctggcgctggccattgtgctggagctgatctccaaggccatcatccccgaaatgcccttcggcggtcaggtgacgctggtggccatgctcccggtggtgctgatctcctaccgctacggcgtgaagtggggcttcgtttccggcttctgctacgcgctgctggaaatggcactgggcgcgaagaccgtgagcgccgcctttcagcccggctatttcggcgacgacaccatgatcttcaaggccatcctcatgtgcctgctggactatctgctcgcctacaccatgatgggtctgggcggcattttccgggataagatcaagaatcccggcaccagcctgatgtgcggttctctggtggcgctgggtgcgcggtatctgtctcacattctgtccggatacctgctgttctccggctgggcggagtggttcttcacgcaggacggcttccccgcatggggcgcgaagctggtggagagcctcagccccgtcgcgctgggctgggtctattccattgtgtacaacggcttctacatggttcccgagctgatcctcaccgccatcgcggcgcagctgatcgccagaattccgaagatcgtggtcaaggttgactga

SEQ ID NO: 227 - DNA, 1077 bp, Unknown
  Unknown gut bacteria
gatccgctgctcagccgaagacgttttgttcagagattccgccaaaagaaaggggcggcggatgccatgacaatcaaagatctggctgcaaagaccggctatgccgtcggcaccgtttcccgggcgctgaacaatcatcccaacgtcagcgagcgggcaaggcaggaaatcctggaggccgccgccgaaagcggctttcagctgaacgtcaacgccaagcagctcaagcagcaccactccaccgccattctggtggtggtaaagggtatcggcaacgagctgttcggggagatggtggagtccatccagaccctgatcgcccagacccactaccagctggtggtggactacatggacgaggacgaaaacgaagtgcgccgagccgcgcagctgtgccgggaaaagaagcctctgggcatcctgttcctcggcggcaacaacgagaatttcatccgggatttcgggggcattgacgttccctgcgtcgtggtcaccaacgacgcctccatgctgtcctttgacaacctgtccagcgtctccaccgacgaccgggaggccgcgtgcagcgccatggatacgttgattcgtctgggacatagccgtatcgccatcatcggcggcgaccgggccatttccgacaccagccgtctgcgctacgagggctgtatgcagtccttcactgcccacggcatccccttcgaccccaagcgggactatcagggcgtgcgctattcctatcaggcggggtatcaggcgaccaaggcgctgctggataagggctgccggtttaccgcgattttcgccaccgccgacgtgatggccatcggcgccatccgcgccttgcaggacaacggcctgcaggtgccggaggacgtgtcggtcatgggcgtggacggcctgccgctgagcagcttcctggtgccgagactggccaccgtccgtcagaccgtttccctgctggcaaagcgcagcgtggaaattctgctggggaatatcgagcggaacgcgcccgcctgtcacgagacggtaccctttgagatcctctcccgggagagcatccgggaaatttcacactga

SEQ ID NO: 228 - DNA, 1941 bp, Unknown
  Unknown gut bacteria
atgggtgcatactttttcgtgatggctgctttctgcgccgcggcgctgctggtggggcattactggctggctgccggagaaatggcggtgacggtggtcacgttcctattgtacgttctggacaggacacgccgggagcgtaaaattcagcagtatatccagtcggcctccaacacgctggaagcttccagcggcggggaagcgcccctgcctgcggtgatggtccgtctgggggacggggacatcgtctggggcaaccatcgtttcagcgagctgacggggtacgccgacaccatgacccagctgcggctggaagaggtgctgccggacttcaccctggactggctcaccgccggaaaaacggaaagcccccatgacgcggttctgggcaaccgccgctaccgggtatacggcaccaccatccgggcggaggacaaccggggcaccatgctgggcgtgctgtacttttccgacctgacggagctgtatcaggtgcgggacgagtatatccgctcccggcctgtggttgccatcatccttattgataattacgaggaactgaccaaaaacctgacggaaagcgccatttcctccatgaacgccaaactgaacgaaaccatcacccggtggacggagggctacagcggattgcttcgccggttggagcgcaaccgcttcctgttcattttcgagaagcgggacttagaacgggcgaaggaaaataagttctccctgttggaagacattcacgagattgtcaattcctccggcctgcccgcctccatttccatcggtctgggcgtggacggcgagagcttcgaggaaagctatgattttgccgcgctgggcatcgagatggcactgagccgcggcggcgatcaggcggtcatcaaggatcgggtcaacttcaatttctacggcgggcggaaccgggaagcggattaccgcagcaaggtacgttcccgtgtgacggccaattccctgatggagctgatcggccagagcggacgggtgttcatcatgggacacaagaacgccgacttggacgccgtgggcgcggccatgggcatcagctgcctgtgccgcaagcgggggaagaaggccaatattgtcattgacttggaaaacaatgccgccggaaagctgatcgaggaaattcaggcggttcccgaataccgggacgtgttcgtgtccgggcaggatgccctgctgatggcggacaaccggagcatcctcgtggtggtggacaccaaccggccggatcaggtggagtgcagaccgctgcttgaagccatttccaaggtctgcgtggtagaccatcaccgccgggcggcggattatatcaaccccgtggtggtcaaccttcacgagccttacgcctcctcggcggcggagctggtgacggaggtgctcatgtacgccgtggagaagaaggacgtgctgcctattgaggcggaaagcctgatggcgggcatctgtctggacaccaagttcttcaacgtccgtaccggcgagcgtacctttgaggccgcagccgtcctgcgccgtctgggcgcggacaccacggaggtcaagaagctgatgcagaacgacttccaggacaccatggcgaagtatcagatcatcaaatcctcccgcctgtaccggcaggagatcgccattgcggcgctgaacacccccacgacccgggtgctggcggcgcaggcggcggacgagctattaaatatttccggcattaccgcgtccttcgtcctctatccggacggggagcaggtcatcatttccgcccgaagtattggcagcgccaacgtccagatgattctggagccgctgggcggcggcggcaacaccgctacagccggggcgcagatgaaggacaccaccgtcaaggaagcgctggacgagctggtggcatccattgataagttctacgaagaataa

SEQ ID NO: 229 - DNA, 909 bp, Unknown
  Unknown gut bacteria
atgagttggttttggttttccattattgctttgctgtgctggtccggttccgatttcttttccaagatcggctgccgggacgcatccgacaaatacagtcagtataaaatggtcacagccgtcggcgtggtcatgggcattcatgccgccattgagattttcgtcggcggcgtagagatctcatggcaggtcatctggacgtacctgcctgtctccctgctgtacatcggctccatgacattgggctatgtgggacttcgctacattgagctgtccatctcctcccccatctgcaacgccagcggtgcgctggtcgccatcattgccattgtcagcggcaccgccggaaaaatggcgattgctcagtacatcgccattttcctcgcctgtgccggtgtcatcggtcttggctttgtggaggccaacgaggacgatgaccttcgagccgcccggcaggaggcttccaattacaagtacgcaaaatcatggttagctctggcgctgcccattgcctactgcattctggacgcggcgggaaccttcgccgacgatcttgtgctggaaaccctgaacgaggattctgccaacgtcgcctacgagctgacctttctggtcgcgggcatcgtcagcttcgtctacaccgtcatcatcaagaagcagaagctgctgcccaaggcggaaggccccaagtacatcggcgcggcctttgagaccgccggtcagctggcctacatctacgccctcgccagcggcgagtccgcgctggccgcccccatcatcgcctcctactgcatggcttccgtcctgtggagccgcctgttcctgaaggaaaagctgagctggaagcactacacctgcattctggtcacctttgccggtatcctgatcatgggaatttacgacatgtaa

SEQ ID NO: 230 - DNA, 1356 bp, Unknown
  Unknown gut bacteria
atgaatttctccaacgcttgcaggcttaaaaaaggtttgagcctgattctgatcgtacttatggtagtcggtatgttctccggctgtaagaagaacaactccgagaccgagccgaacacgactccctccctcaatctgaatatgtcggacacctccgctcccacgcaggagacggtcccccccaccacgacggaacccatcgtgtataacgagaatatgggtaccgtcaccaaccagatcagtgtccgcgtcatccccagcaaggacgccaacgtcaccggcacactggacgccggcaccgtggtggagatcctgcgtcaggaaaccatcgccgacatcacatggggcatgatcagcacccctgtcagcggctggatctgcatggactatgtgaagatgtattcttctcagaacggctccgccagcagcgagaccgatcccaatgcttctcagcccaccacccccgcaccgtccgacaatacgggcaataccaccaacaatagcggtactcacaacaccaagggcgtcatcagtgcccgcagtctgaacgtccgtgacgaggccagcgcctccggcaagatcgtcggctcctacttcaagggcgacgttgtaactatcctcgagactaaagacggctggggccgcaccgacaagggctggatcaagatggagtacgtcaacaccaccggcactaccaccggcggcaacaccacgacgaccaccaccggcaacaataacaacactgccggcaacggcagcaccactaccgtcgccaagggcatcgtcaacacccaggagctgaatatccgcagctctgccggtactgacggcgaccgggtcggcagcctgaaatacggcgatcgggtggagattctggaaaagagcggcgattggggccgtatctccaagggctggatctccctgaactacgtctatcaggacggcaccaccggcaccaagtccgcaaagggcatcgtcaccaccgacggtctgcgcatccgcagcggccccggcaccacctatgaatccgtcggctcctacaacagcggcgaccgggtcaaggttctggagcagttcacctacggcgacaccacctggggctgcaccgacaagggctggatctccatgggctacgtctatcaggacggcaccgatgtgggcaagaccgtggaaggcatcgtcaccaccgacgagctgaacatccgcagcggccccggcacgggctacgattccgtgggcaagctgtatacggacgaggtcatcaagatcttctatcaggtcactgtaggcgaaaccacctggggctgcaccaaggacggctgggtctctttgaagtacgtcagtctggaaggataa

SEQ ID NO: 231 - DNA, 2052 bp, Unknown
  Unknown gut bacteria
atggaggctctgcgcgcggccgttcagaacggcgctgacgccgtctacctcggctgcggcgcgttcaacgcgcggcaaagcgcgaaaaactttactccccagacgctggtggaggccattaaatactgccatgtccggggcgtgcaggtgcacctgaccctcaacaccctcgtctccgaccgggagatgaccgaggcggcggagctgatccgctatgccgcgcagaataatattgacgcctttatcgtgcaggacttaggcgtggtgcagctgtgccgtcagatcgcccccggcgttcccatccacggcagcacccagatgaccgtccattctctgcccggcgtgctgctgtgcgccgccatgggcatcaagcgggtcgtcctcagccgggagctgagccgggaggaaattcgctacatctgcgccaactctcccattgaaattgaagtcttcgtccatggcgcgctgtgcatgtgctattccggccagtgctacatgtccgccatgatcggcggccgctccggcaaccggggccgctgcgcccaaccctgccgccagagctacggctacacccactggcaggaaaaataccccctgagtctgaaagacaactgcctgattccctatctgcgggaattgcaggaaatgggcgtggtctctttgaagctggaaggccggatgaagcgggcggaatacgtggccaccgtcaccgccgtctaccgcaaggcgctggacgagatgaccgtcaccaagcccatgatggacgccctgtacgccgccttcaaccgtcagggcttcaccgacggctactatacaagtagggtggataccaaaatgttcggcgtgcggcaggagaatgacgacgacggcaaatggcttcaggccgcacggcaatcctacgaagcaggggagaccccccttgtggatatccgctttcaggccatggtcaccgtggacggcagctgcgtcatcgccaccgacccggagggtcggacatgccgctccgacggccccgtgccggaacgcgcccagaacatttccctcaccggggcgatgctcgcacagcgggtctccaagaccggcggcacgccctaccggtgcgtggaggtgcgcacccgggtggatcccggtctcattatctccgcttccgccatcaatgccatgcgccgggacgtgatgaaccagctcaccgccatccgcgcccggcgagaggagcagaccctgcgcaagcccaagcccgtgccggaatacaaaggcccctcgggtctgcccggcctgaccattcaggtcacctcccgggagcagctgacccccatgctgttagatctggaaaccacactgctgtacgttcccatccacatcttgctcgccgacggggagctttgcgcccggctggtgcagcggggacgagtggcggcggtgctgcccagaatcgtccacgacggggagctgccccggatcaaaaagagcctggaagtcctccgcgccgccggtgtccgggacgcgctggtgggcaatctcggcctgatcgcccccgtgcgggaggccggaatgcgggttcacggggatttcggcctgaacatcttcaactccgcctccatgaacgtcatgcgttctctggaaatggcttccgccacggtgagctttgaaatgaccctgccccagatccgggacatgagcaaggcggtgaacgccgagctgatcgcctacgggcggctgcccctgatggtgacggagcactgcctcatccacaacaagaccaacgaatgcacctgccatctgaaagccacccgcctgatcgacaagaccggcgcggagttcccggtcatccgggacggcgacagctgccgcagcgtgctgctcaacggcaagaagctgagctggctcgaccggcaggacgatcttgccaagctgggcttatgggcgacgcggctgtacttcaccacggaaaattccaaggaagttgaccgcgtgctgaacgattacatgaaccccgaacccctcgaccccggcgcgtgtacccggggactgtacttacggggtgtggaataa

SEQ ID NO: 232 - DNA, 1392 bp, Unknown
  Unknown gut bacteria
atgctaaactatcatgtcaaggtcggcctggttcccattcgcagagacgttacgccccgccccggtatctttaactgggaaaaggcggaggagcgctgcgccgcagcggtagcctatatcgaggagcatttcacttccgagaacgtttccttcgtggatctgaagggaatcaacgccgtggatgttctctacagcgacaaggacgtggacgccgttatcgagcgctttcaggcggagaaggtggacgcggtattcctgatcaacggcaacttcggcaatgaggaagtggccggcgcggtggccaaggccatcggcaagcccgtgctcctgtggggccctcaggacaccgtgtttgaggcggacggcacccggtataccgattcccagtgcggcctgttcggcatgagccgtcagctgcagagaatgaacgttccctttacttacatcgaaaactgccgcattgaagacccgattttcaccgagggcttcctgcggttcgtgggcgtggcctgcgcggtgaagaactttaagggtatgcgtgttgcgcaggtgggtatgcgtcccaagcccttctgctccgtgatcttcaacgagagcgacctgatggacaagttcgacatccatgtcatccccgtcaatctggccgtgattcaggacaagtataaccggattctggagacccggaaggacgagctggctgaaggtgttgccaagctgcgccagatgtacgagatcgacgccctgtccgagccggtgctggacaaggtgtatgctttcgtgctgctgtatgaggaaatttttgaagagtacaacgtgaccgccgtttccgcggagtgctggactgccatgcagctgatggtgggtgctatgccctgcgctgcctatcccttgctcgcggacatgggctatatcatcggctgcgagagcgacatgcacgcgaccctgacgcaggttgtgctgaagagcctgactctgggacagaagaagcccttccttggcgaattcaccacccgtcaccccagcgatcggaatgtggagctgctgtggcactgcggcccctttgcctattccctgaaaaagcatggtaccggcgcgaagatggtcaacatgcgtcagtggatgcaggtggaggacggccatttcaccgtggcgcggatcgatcaggatcacggcaactattccattgccgtctgcgagtgcgacagcgcggaaggcccctataccttcggctcctatatgtggggcaagttcaaggatctgcccggggtggagcgcaagctcatcgaaggcccctacatccatcacatgtccgagatcgagggcagcctgacggattccatccgggaattctgcaagtacgtacccggtctgacctttgacggcctcgactaa

SEQ ID NO: 233 - DNA, 909 bp, Unknown
  Unknown gut bacteria
atgaacaaacaggaactggccgccatggtggcggagatattgagcggcatggagcatgagccgccggtgaagggcggtgactatcgcccgaccgcgccccagccggagaaagcgcccaccccgtaccgggacggcgactttgtcccggatgtgacggcgctggacttacggaagctctatctggtggaacacgccgaaaacgaggaaaaattccggaaaatgaaagaaaagaccccggcgcgtctgggcagcggccgggcgggggcgcggtacaagaccctgaccatgctccgtttccgcgccgaccacgcggcggcgcaggacgcggtattttctcaggtcagcgaggacttcgctgccaaaaacggcatggtggaggtcagaacgaaatgccgggacaaggacgaatacctgacccgcccggacttggggcggtgctttgacgaggaaaaccagcagaaaatccgtgccgccgtccccggaacgccccgggtgcagatcgtggtgggggacgggctttcctctgccgccatcaccgccaacgccatggattgcctcgcggccatccgggacggcctgaagctcaggggtattgacccgggaacgccgattttcgtccgctactgccgcgtgggcgcgggggacgccatcggcgacgtgacggggtgcgagctggtgtgtatgctggtgggcgaacggccgggtctggtgacggacaagagcatgtccgcctatatcacctaccagccaaggactggcgtttccgaatccgcccggacggtggtgtccaacattcacgcacagggcaccccggcggtggaagccggggcgcacattgcggggctgatcgaaacgattcttacaaaaaaggtctccggcgtgggactgcatctggaggcgggggcatga

SEQ ID NO: 234 - DNA, 1392 bp, Unknown
  Unknown gut bacteria
atgaatcgacgaaaccgggttgccttttttaacattctgagcaccgttttgctcagaggcatttccatattcacagcgcccctgtttacccgtctgctgggaaccagcggttacggcgttacccaaatttacaacacatgggtggctgtgatcgccattgtgttcacgctgcaaacccaggggacgctggtcaacgcccgggtggagtacccggagggagaccagctgcgctaccagtcctcggccatgagcctgtccacgctggtgtatctgattttcagcgcactggtgctgtgctttatcggccccatttccggggcgctgaagctgagctggtttttgatcgtgctgatgctcattcagggcttcggcaccttttgcgtcaactttctgaacaccaaattcgtctacgaattcaaggcagggcggaacatggtcatgtcccttgtggtgacgctgaccaccctgatcctctccattgtgctgattctgctgctgcccaagcagatcaactacttaggccgcatttccgccattgccgtgacctacggcgtgctgggcattccggtttgcatctggattctggcgaaggggaagaccttttacaacaaggaatattggaaattctgcgtcgttcttgccattccagcggtattttataatctttccgacctgattctggggcagagcgacaaggtgatgctccagcagatgatggacgaggccacggtgggctgctacggcgcggcgctgaatttcggcggcatcatgttcactctgttcaccgccctgaacaattcatggtgcccctttttcttcgaggacatgaagcagggcaaccgggagaatctgcgggaaaaggcggggaattttctggagcttttcacggtgctttccgtgggcttcgtgctgctggccagcgaagtgtaccgctatgtctatgtttcccgggatttctggggaagcacgatgctgattcccatttttgtgtccagctactacaccaatttcctgtgtaccttcccggtgaatttcgagtattaccacaaaaagaccaaggtcgtctcgatcatcactattgtgtcgtcgctgataaatgtggggctgaattacctgctgatcctgcgcatcggcatggccggcgcggcggtggcgacgctgatttcccacagtttgcagctgacgctgcactatctgtacgtccgtttcgctctgggcgggaaagaataccccttcccgctgaaaatgtgggtcgggtacgcggcggtgttcgccgctgtggccgtggcgtccgtggcggcggatggactgtggctggcgcgctggggactgggcgcagccattggcctatgggagcttttgcggatcagaaagcggaaagtattgatctga

SEQ ID NO: 235 - DNA, 864 bp, Unknown
  Unknown gut bacteria
atgcgcaagatttgggaagattaccgctggattccggcgacggctgtgggaagcgcggttttcgcgctgggcttttccctgttcctacagcccaatgagatcagccccggcggcatttccggccttgcgctggtggccgtggagctgctgggctacggcagcgtgggcgtgctgacgatccttattaacctgccgctgttcatcctcggcggtgtgaagatcggcagacggttcttttgcggcagtctgctgggaatggttctcagctcgatcctgatcgacgcttttgccaaaatcacgatgccgcccatggattcgctgctctgcgccctttacggcggcatgatctgcgggctggggctgggcatggtgttcatctgcggcacctccaccggcggctcggacatcgtggtgcggctgctgaagctcaaataccgggacgttcccatcggacagatttccatgtgctttgacgccggggtggccgtcctgacgggcatcgtgtttcaggacatcaccaaggcgctgtataccggcgtggcggtgtttgttacgggcaaggtgctggatgccgtggtgtaccggttcgactattccaaggtggcgctgatcattaccaaggagtacgacgcggtggcggaggccatcggcaccaagctggacagaggcgcaaccttcctcaatggggaaggctcctacagccatgagccgaccaaggtggtgctggccgctgtgaaaaagcagcaggtcacggagctgaaggagctggtcatggccatcgaccccaacgccttcgtcatcgtgcaggaggcgcatcaggtgctgggagacggattctcccattattccaaacaatcgctgtag

SEQ ID NO: 236 - DNA, 1071 bp, Unknown
  Unknown gut bacteria
atggaactgacagagcggaaaaagaaggttctgcggtcggtggtggatttgtatatccgcacggcggagccggttggttccaaggccattaccgagctgccggacatgaagtattcctccgcgaccatccgcaacgaaatggcggaactgaccgccatgggttatctggagcagccccacaccggcgcggggcgcatcccctccgccgccggttaccggctgtacgttgacgagctgatgatggattaccgcttgtccattgacgaaacgaagtccatcagcagcgccatcgaggaaaagatgcagcgggtggataaaatggtggaaaaggtggcaaagctggtatctcaggccaccgatcttcccgccatctccgccgcgtcccgacagggcagcgcctgcgtcaagcggttcgacctgatcctggccggacagggaagcttcattctggtgctgatgctgggcggcgagcaggtggtaaacaagctcatcaagctgccggtaaacgtcagcgaaacggatctgaagctcctgagcgcggtgctgaacgccagcatgacggacactccccttgaggacttcaccgccgagctgatggaaaaggtcatgcgttcggcgggtgcggcggcaagtctggtgccggtgattctggacttcacccaggagacgctgaaaaacagcgactccaccagagtggccgtcaccggtcaggcaagactgttgagtttgccggaataccgggacgtggacaaagcccagcgggtaatggattccattgacgaagaggcactggcaaaccttcccgccgtcatggagggcgccaacggtacgaaagtgctggtaggccccgaaaacgtggcggatgagctcaaggacacctccgtcgtgatgaccaagtttgacatcggcgacggaatgcagggcatgatcggcgtggtcggccccacccggatggattacgcaaaggtaacggcgcgcctgagctacttcgccgagagcctgagcaagatgttcggcaagcccgagcagccccagcagccaaagctgccggagccgccgaaggaaggatag

SEQ ID NO: 237 - DNA, 999 bp, Unknown
  Unknown gut bacteria
ttcatggcggtgacgatctatgatgtggcaaaggaggcgggggtatccattgccacggtttccaaggcgctgaacgacagctacaccatccccgaccagaccaaggcggcgatacgggaaatcgcggaccgtctcggctaccgccccaacgcgcgagccaagaattttgcccggcaggcaagcggcacggtgctgttcatcacggatttctaccagaacattgcctttgaaaatccccatatgttcgaaatcatctccggcattgccacgtatctggacggcaaggactattccctgaccctgaagccgctgacgaaacaggcggctcccctttacatccgggacatcatccagcagcggcaggcggacgcgctcatcattcatgctttcgttttaagcccagaactggccgcgatcctttcccgggtggatttcccctatctggtcatcgggaagccgggattccggggcaatatctgctggatcgacgtcaatcacgagcaggcggggcagattgccgcgaattatctgctggacaagggctaccggagaatggcctttatcacggggcaggaaaacgacgccctgtcccagagccgcctgcgaggaatcaatcaggtcatgtctgaggaagagctgagcgttgaggtcgtctgcaatgaatcgccctacgcactggacgacgaagcgctgtacggtctgctgatgcgccgcccccgtccggaggggctgctttgcagcaataaccatcttgctctgcactgcctgcaatacatccgccggataggtctgaaggtaccgcaggatatcgcgctgctcacctttgacaactaccccttttccatgctgacagacccggccatcacggccgtggaggtggacatgcacgacatgggcgtcaacgccgcccggtttgtgctgcagcggatacgaaagcccaatttacaaacccaatcctactgcacctccccgtgcatcctggaacgggagtctacataa

SEQ ID NO: 238 - DNA, 876 bp, Unknown
  Unknown gut bacteria
atggaagttgaaatcaatggcgcacgaaacatagttgcatttgataacgtcccgctgttcggaacggtcacgatcacccagacgctgatcgtcagctggctgatcctgatcatcatttccgccctgtgcatctggctgggttccggtctgaaggttactggcatttcccggaagcaggccgtcgccgagacgatctacacctctctggtgaacttcgtccggggcaacatggggccggattttgaccggtacatcccgctggtgggcacgattttcgtcaccagcattttctccaacctaatcagccttgtgggtatctggagccccaccgccgatctgatgacggagcttgcctgggcgctggtggtgttcgtgctgattacctaccataagatcaaggcctccggcatcggcgcgtatctgaagagcttcctggatccccttttcatcctggcgcccatcaatgtcatgagtgagctgttcacccccgtctccatggcctgccgtcatttcggcaacattctctccggcacggtcatcagcgccctgatctacgccgcgctggtcgccgccaacagcgcgctgttccatctgctggcatccagcatgtatgtcgcgctgatcgtcaccatcgttggtctgattcctctgattatcggctttaccaagaagaaaaagaagctgaaaattcttggcatcatcgtcacggtgctgggcgttctcgccattctcacctgtctgggtgtgcattacccctggctgaccattggcattcccgccattcccagcctgtattttgactggttcagcggctgcattcaggcattcatcttctgcaccctgaccaccctcttcatcaaacaggccgcgggctga

SEQ ID NO: 239 - DNA, 1527 bp, Unknown
  Unknown gut bacteria
atgaagaaactgacggatctggaatacctcaggctgaacacgtttcagcgtctgtggtacaacattgtcctgttcgttctcggcatccccggctggctggcctctttggtcaaagccgtcgggaacgggatcgcaggcgctttcaggggcatccgaaacgagctgacggattgcgccaccacctttacaaagggcagctggaaaacgaaggtatcctaccttgtgatgggcttcggcaatattgcccggggtcaggtgctgcggggactgctgttccttgtctttgaatctgtgttcatcgtttatatggtcacaaccggcagctactggctgggcaagttccgcacgctgggcgatgtgccccccggagaggtatacaacgaggtgctggacacctatgttcgggtcaacggcgacgactcttttaaaattctgctgtacggcctcctgaccattctcttcatcatcgcttttgtctacacatggcggctgaacgtgaagcagaaccggatctcggaggagatccttgccacgggcaagaagctcaaaagcggaaaggacgaccttcgttccgtcctggacgatcagttccacaagacgctgctggcactgcccatcacgggcgtccttgtcttcacgataatcccgattctgttcatgatcctcgttgccttcaccaactatgacggcgctcacgacggctacagcaacctctttacatgggtggggctgagcaatttcaacgagctgatcagctccagcagtgcggacgcgaacctcagctacaccttcggcgaaatcctttcgtggacgctgatgtgggcgttctttgccacattcaccaattattttctgggaatgctggtggcgatcctcatcaacaaaaagggaatccatttcaaaaagctctggcgcggcattctggttctgaccatcgcggtgcctcagttcatttccctgctgtatgtctccaagctcttcgataccaacggcgttgtgaatgccatgctcctgaagctgggctttatcgatcaggccatccgcttctgggagaataccacctccgcccgaattctcgtcatcgtaatcaacatctgggtcggtatcccctatctgatgctggtgagcaccggcattctgatgaatattccgcaggatctgtacgagtcgtccaaaattgacggtgccagtgtctggcagcagtatatgaagatcacgcttccgtacatgctcttcgtcacgggtccctacctgctgacccagttcatcggcaatatcaacaacttcaacgtaatctatctgctgaccaacggccgcccggcaagtccggatcttgtaaccagcggcggcagtgccacaactacggatcttctgatcacctggctgttcaacattaccaccggtgccagcagcaactataaactggccgccgtgattgccatcatgatcttcgttgttgtcgcggttctttccctgatcgtctacaacgtgatcccgtctaccagaaatgaggaggattattcgtaa

SEQ ID NO: 240 - DNA, 1113 bp, Unknown
  Unknown gut bacteria
atgaacgtaaccggtattgtatttaccaacgacgcaagccttggtgagctgaccaccaagcgcaccatggcctccctgcccttcggcggccgctaccgtcaggtagactgggcgctgtccaatctggcctgcgccggtgtccgccacatcggcatcatctcccgccacaacttccagtccctgatgaaccacatcggcgacggtgaggagtggggcctggagctggaggagggcggtctggaattcctgactccctatgcccagtccgaagtccaccgctaccggggcaagctggagtctctcgccagcgccatggacttcctcgcctacggctctgatgacgagctggtcatcatgaccgactccgccattctctccaacatcgacctgaccaaggtcatcgccgcccacgtaaagagcggccggaacatcaccgttgtcaccaaggccggtatctgcaacggggaaaagatgatcgatctggccatgaagctggacgggaaaggcaacgtgaccgacatgctggtggactttgccgcccccgccgactacgttgcctccatggacatcttcgtggtggacaagaagtggctcatgcagcagaccagagaaatgattgcccgggacaagttccacatggatcgcgacctcgttctgggcggctggcagcggggaaaggtctccgtcaatgtctatcccttcgacggtgccgccctgtacaacgagtccgtggaggaatatttcaaaaactccatggcgcttatcgaccgggacatccgccacgacatgttcggcggcaatcatcccatctacaccaaggttcgtgaccgtgtccccacctactacggcgaggaatgccagatcgccaactgtctggcggccgacggctgcatgctggagggcaacgtcaaggaaagcattctgttccggcaggtcaccatcgccccgggcgcggacgtggaaaactgcgtcatcatgaacgactccgtggtaggcgagggcgcggaactgaaatacgtcattctggacaaggacgtcaccgtcaccccgggggcaaagctcatcgggacaaagaagagtcctgtcatcgtcaagaggggggaaaccgtatga

SEQ ID NO: 241 - DNA, 801 bp, Unknown
  Unknown gut bacteria
atgaacattgccattgtcacgggagccagctccggcatggggcgggaattcgtccgccagctgggcggatacgtttccgtggatgaaatttgggcggtcgcccgccgggcgtcggctctggaaaccctgaaagccgaagcaagcgtcccggttcgccccatcgtgctggacttgctggaagaatccagctttacagaactggaagccctgctggaatccgaaaagcccaatgtcaggctgcttgtcaacgccgcgggcttcggcaaattcggcgcttaccagaaggtccccgcagaggacgactgccgcatgatcgacctgaactgcaaggcgctgctgctcaggacccggctgtgtgtcccctacaggcagcccggcagccacattctggagctggacagcctgtctgccttccagccagtgccgtacatcaccacctacgccgccaccaaggctttcgtcctcagctacagccgctccatgaaccgggagctgaaagccaagggcatccgggtcatggccatgaaccccggctgggtgaaaacggaattcttcaatcatgcgttccagaccaacgccgataacgaggtgcgctactttaaccgcctgtacgaggccaaggacgtggtcaaaaccggccttaacgacctgtaccactcgaaaaaggactgctccatccacggcttccccgtcaaattccaggtgttcctggtgaagctgctgccccacagcctggtgatgaacacctggcttaaccagcagaaaaaagcaaagaacaacaaggggcttacgacgaaatga

SEQ ID NO: 242 - DNA, 660 bp, Unknown
  Unknown gut bacteria
atgctggataaagcgatgatcgaaatgatggcgcagggcatctgggatacctgctacatgacccttgtctccacctttttcggctatgtgatcggtctgccgctgggcattgccctgacgctgacggacgaaaacggcattaccccaaaccgggcggtataccggattctggatatcatcatcaatgtcacccggagcgttcccttcctgatccttctgatcgcggtcatgcccctgaccaagctgcttgtgggcaagagctatggctccaccgccaccatcgttcctctgacgctggccgcggcgcctctggttggcagaatggtggaatcctccttgaaggaagttcccgccggggtcattgaagcggcgctgagcatgggcgcgaaaaccggcaccatcgtccggaaggtgctcatcggcgaagccagaacttccctgcttgtgggcggcaccatcgttctcggcacggtgctgggctactccgccatggcgggcgtcattggcggcggcggactgggcgacattgccatccgctacggctactaccgctacgacaccgggggcatgctggtgacgctggtattcatcgtcgccattgtgcagctgctgcagggcatgggcaacctggcggcgcggaagatcgatcacagaaagtaa

SEQ ID NO: 243 - DNA, 1170 bp, Unknown
  Unknown gut bacteria
ttgaaatattggttcggctacctcaccgccgccatcttcggcgccatcacatgggtgctgatgcggttcggtgaacggttttctactctggtggatatggtgtacccctacgtcatccgcacctcggagtccattcttgcccagtgggcaagcggcgtggacttccccgtctggcagctgctggccgtggctctgtgcgcgctgatccttgccagcattgtgctgatgatcgtgctgaaatggaaccccattcagtggggcggctgggtgctcgcgttttttgccggtatttacatgctccacaccatgctctggggtctgaattactactccggccccctgtccgacgacatgcggctggacgtgggcagctacaatctggaggaactgaccgaagccaccgagttctaccgggacaaagccaatgcccttgccctgcaagtcaaccgggacggaagcggtaacgtggcctttgcggactttgatgcgctggcgggcaaggccggcgagggcttccagacgctgacctacgactacttctatcccattttcgccggttccacccttccggtgaagaagctgggctgggcagacatgtattcctccatgggcatcaccggcgtcaccttcggcctgaccggcgaggcctgcgtcaatccccagatccccggcgtgtccctgccctttaccatgtgccacgaaatggcccaccgcatgtgcatcgccccggaacgggacgccaattttgccgcgttcctcgccgcctccgtccattccgacccggaattccagtacagcgcctattttatggccttccgctactgctacagcgccctgagcagcgtcaataaccagtccgccgcggcggctgccgcacgggtgagcgccggggtcaacgacaatctgaaattcgacatggctgcctacaacagcttcttcaattcccggaaaagcaccgccgccacgaacctcgccgatgccgccaacgacacctatctcaaggtcagcggcgacgaaagcggcgtcgcttcctacggcgaggtctgcgacctgctggtgaactggcacatccagaccgtggtgctgccctccatcaccgtggaggaatcccccttcgacccctacgacgaaacgcaggtggatctgagcggcatcgtcaacgcaaggtga

SEQ ID NO: 244 - DNA, 840 bp, Unknown
  Unknown gut bacteria
atggttgcgaccgacttttcccgggagagggggtatacttttgccataccggctggaggtgatgcgttgaaaatctatctggacttggtggtaattctgaactttctggtggattttttgctgcttttggggacaaaccgtttatcgggctttccggcgtcgcccctccgggcggcggcagcggcggcgctgggggcggtctacagcggggtgtgcatgatgccccggatgcggttcctcgggggactgctgtggcggatcgtcagccttgccgggatggcggtcatcgccttcggctgggacaaaagcgcatggaagcgcagcggtgtgttcgtgctgctcagtatggcgctgggcggcgcgtcattgagcatcggccggggaaatttcctgacgctggtgctgaccgccggcggcgtgtgggcgctgtgcatcgtggccttcggcggacgggtgggttgcagagagtacgtcccggtggagctgacctatggcgagaaaactgtcagcatcgtcgccctgcgggattccgggaacactctgcgcgaccctgtttccggggagcaggtgcttgtggtttctggggaggtggcggaaagactgacgggtctgacgcaggagcaactccgtgcgcccctgaaaacgctgatgtgccgcccggttccggggcttcgcctgatcccctaccgggcggtggggcaggcgggggatatgctgctggccatgcgttttgacggggtgaaaatcggcagccggatgcagagcgccgtggtggcctttgcggcggagggacttggcaggggagacgtatatcaggcactgacaggaggggtcatatga

SEQ ID NO: 245 - DNA, 849 bp, Unknown
  Unknown gut bacteria
atgggaatccggacgaaaagtaccgtttccaatactgtgctctatgtgatccttgtcctcatgtccattatctggctaacgccctttgcgtgcatcttgctggagtccttccggactgaatccaccggacgtgtgggctacatcatccccaagcagtggggctttgataactacatcaatctgtggaccaaaacgagcttccccatttggttccgcaatacgctgatcaccgccctggctacggcggtgctgcaaacccttatggtgctgagcgtcagctatgttctctcccggcttcgcttcaagggcagaaagctgctgatgaacacctgcctggttctgggcatgttcccgggcttcgtcaccatgatcgtgctgtataaggttctcagcggcatggggctgacgggagccaactccgtgccgggactgattctcgtctactgcgccagctccggcatgggatactatgtgtccaagggcttcttcgacaccatccccaagagcttggacgaagcggctcgggtggacggcgcttcccgctttcaggtgttctacaaggtgatcatgcctctgtccaagcccattgtcatttataccgttctcactgcgttcatggctccgtggggcgacttcatgtttgccaagtatatctcccacaatacggaggtgggcatgaatgtggcggtgggtctgcaatactggatctcctcgaagaccctgattgccaccaactataccatgttctgcgcgggcggcgtggtggtggcgcttcccgtcaccatcctgttcatgctcctgcagaggtactatgtggaaggcgtcaccggcggcgccgtgaaaggataa

SEQ ID NO: 246 - DNA, 2931 bp, Unknown
  Unknown gut bacteria
atgaacacattgttccagaacatcctgactgccagcttccacggcagcatcgtcattctggccgtcatgctgctgcggctggtgctgaaaaaaacgccccgaaagtatatctgcctgctctggctgctggcgggactgcggctgctgatgcccttccagatccaaagcgacctgagcttgcagcccagtgccgacccggtggcacaggtgcagcagcagatcagccgttcccagacgcccgccgcgccggaagatttctccccggccgatctggacgtcccggcgccggtgcagacgcccgaagctcttccggacatccagactcccgtcaccaccgttatcagcagcaccccctcccccgccccggaaaccgcgccggaaccggatacaggctttgatttcctgtcggttctgccatggttctggcttggcattgcctgctgcttcggcatttacagtctgtacacctacctgaccctgaagctgaaggttcgggaggccgtcaggatccccggcggctgggaatgcgaccgcatcgagaccgcttttattctgggcttcatccgcccgaatatctacatccccatgggcatgacccccgaggaacagcgttacattctcgcccacgaacgcacccatctggacaagggcgaccactggttcaagatggtgggctttctggcgctggcgctgcactggttcaatccgctggtgtgggcagcctacatcctgctgtgcaaggacatcgagatcgcctgcgacgagcgggtggtgcagttcatggagctggaggagcggaaagcctactccgccgccctgctgacctgctccaccaatcgggcgcacttcgcggcctgtcccgtggccttcggcgaggtgagcgtcaaggagcgcatcaagtcggtgctttcctataagaagcccggcttctggatcagtctggtgggcgtgatcgccatcgtcttcgtggcggtgtgcctcgtgaccagccccgcgagaaaagatgcggcagccgccggggataccgaaccaacctccgtctccgacgccgtttccgtacataatgtggacgagctgctggccgccatcgcgccggacaccgtcatccagctggagccgggaacctacaatctgtccggcgccaaaggctacggcctgccctcggaaagcccctactacgcatggacggaaaagtacgacggctttgagctgatgctgcaaaacgtaaagaacctgaccatccgcggcagcggcaaggtgaacacgactctggaatgcgacccccggtctgccagcgtcatcaatctgaagaattgcgaaaatgtcacgctggaggatttcaccgccggtcacactctggaactgggtcagtgcagcagcggtgtcatctatctgcaaaactgcaccggcgtgggcatgaaccgcctgggcatttacggctgcggcatgatcggattgcaggcggcggattccaaggacatttctcttgcggacagcgacgtgtacgactgctccagcagcgccgccgagatcatcagctgtgaagacgtcaccatctccggaacccgcatttaccgcatcggctccgaggaatacggcggatacacctattttgatattggttccagccggaatgtgacggtggaaaactgcgaaatcagcgacagcagccttatgtatctggcaatcgtttccggaagcaccgttcagatgaagggcaatctgttctccaacaaccgcagccagctggaagcattcaacttccagtatgagtaccacgaagatacccagacgccggcagacgaatcgagtatggttctggacggcaaccggtttgaaaattgcagcgtccgccgctggtttggagccgacggtaccgtcacggacggcgcaggcaatcctcttaccgatgagcagatgaacaagctgtactccacaggcgcgacggagccgacccaagcgcagctggaaatccacgtttccacggtggatgagctgatcgccgccatcggccccaatgtggacatcgtgctggacggggagctttacgacctcagcaccgccaccggctacggcacctccaagggcgattattactactggctggacgaatttgacggcccccagctggtcatcgacggggtggacaatctgaccatccgcagcaatgacggcagcgtaacgggacacaccatcgctgccatcccccgctacgccaacgtcctgaccttccagtcgtgcagctacatcaccctctccggcttcaccgccggtcacacaagagagcccggttactgcagcggcggcgttctgcggttccaggacagcgaccacatcaccgtggacaaatgcggtctctacggctgcggcattctgggcgtagacgcggaatactgcaccgatatacgggtcgccaactgcgacatctacgagtgcagccagggcggcgtccagttctggagctccgagggcattgtaatggaaaacaacaccctgcgggatctgggcggcagcgacatgagcttccacgactgcaaggatgtgacggtgaacggtgaaaccgtgattcccgccagtatgttcttcagtcggatcctccagtcggaggaacagcagggcacagaggcactcaacgccttcgttacggagtttgcgtgtgcctatttttacggagatatggatacgctgccccggctgctctccaaagactacgcaggcggagtggaagcctattccggcaatacaaacgacgtgattgtgtgctggcatgaggtcacggtggacatgtggaaagaggcagaggccaacggcacctatgaatttgcctacccctaccgtgagaacgttgacagcgaaattgcctatctgaccatcgtcgtcgtcagagaaaacgacgcatggaaggtcagcagctactctctggccgaataa

SEQ ID NO: 247 - DNA, 1287 bp, Unknown
  Unknown gut bacteria
atggagatttcctacaccattttcgacctgcttttctatctgctgctctacgccttcctcggctggtgcgtcgaagtcttttgcgccgccgtgaaaagcgggcggtttgtgaaccgtggttttttgaacctgcccctgaatatgccctgcggcattgccgccgcgctgctgctgccggtgctgggcaccatgaaccacaagaccatcttacaatatgtcatgacgctggtgatctacattctggtccggtgcgtgaccgaccagttcgtccggggcgtcagccggggaacctttgccgccgcgccgaagggaaggccgtttttcctcaacgcggccgccgcggcggccgtcatgctgctggtgtatctcgtggtgcatcccggcatgatgggacttttgtacctgatgccaaagtggctggaacggacgctggtcatcgctgggatcgtcctgattctggcggacttcatcggcgtgatgcgcgccctgcgcaccagcagcgccacccggctgaataaggtcgggcaggagaccacccagcgcatggccgaccggatcagcaataccatctggcggcgtctgcaaaaagcctaccccggccttgcggcagcggatgtgccggggccggaacggtatgtctttgcccggggcatctgctttgacaagctggtgtgggtgtttctcgtgacctctttcttaggggcgctgatcgaaatggtcttctgccgggtcacgtcggggcagtggatgagccgctccggcgtgctgtacgggagcttcagcttcgtgtggggtcttggcgcggtggtgctgaccatcaccttgcagcggattgcggacaagcccgaccggcggatctttctcgcgggcttcgtcatcggcggcgcttatgagtacctttgcagcgtgttcaccgagctggtattcggcacggtgttctgggactacagcaaaatgcccttgaacatcggcggccgcaccaacgtgctgtactgcattttctggggactgctggctgtggcatggatcaaggtgctgtatccgcccatgagcaagggcattgaaaagatttcgccgctgctggggaaggtggttacatgggttatcatctttttcctggcctgcgacggtctgctcactggtgccgccatgctgcgctacaccgaccgtcagaacaacccggaacccaaaaatgtggccgaagcgtttctggacgacacctatgacgacgactggatggaacaccactggccgaacatggtggtcacaaaggacgtggaatcataa

SEQ ID NO: 248 - DNA, 1284 bp, Unknown
  Unknown gut bacteria
ctgacccggttcaagcccgccaagcgggacatgtacgcccgggaaggattcgtctttacggcgctggcatgggtggtcatttccctgatcggcgcggcgccctttaccctgtccgggcagatccccagctacttagacgccgtgtttgagacggtttccggctttaccaccaccggcgccagcatcctgaccgatgtggaggcgctggacaacgggatgctcttctggcgcagcttcacccactggttagggggcatgggcattctggtgttcatgctgtcgctggtgaatatgggcggacaggccaaccacctgctccgggcggaaagccccggccccaccgtgagcaagatggtgcccaatatgcgcaaatccgccgccattctttacggcatttacatcgtcatgacggcggtggaggtggtgctgctgcttatcgggggaatgcccctgtttgacagcctgtgtaccgccttcggcaccgccggcaccggcggcttcggcatcaagaacagctccatgggctactataacagctactatcttcagggcgtggtctccgtgttcatggcgctgttcggcgtgaacttcaacgtttactttttcctgctgatgaaaaaatatgccatggcctggcggaataccgaggtgcgggcgtattttgccatcatcgccgggagcacgctgattattacccttaacattctggggatgttccccacggcgtttgacgcattccaccacgcttttttcgccgtctcgtccgtcattaccaccacgggcttcagcacaacggattttgacctgtggccccagctcagccggtgtattctggtgctgctgatgatcgtgggtgcctgtgcggggtctaccggcggcggcgtgaaggtttcccggctggtgattctgtgcaaagcccttggctccgagctgcgcaagctgcttcatccccgctccgtgcgggtgctgacggtggacggaaagcccgtcagccgggagacggtgcagggcgttcagagctacatgaccctgtattttctggtgacgctggtgtccgtgctgctggtggcgctggacaatctggattttgtcaccacgtttaccgccgtgttggcgacgctgaataacatcggccccggcctggggctggtcggccccacgggctgcttcgcggccttttcgccgctggcgaagatcgtcctgacggcggatatgctgttcgggcggctggagctgttccccatgctgatcctgctcatgccctcgacatggcggaaatattga

SEQ ID NO: 249 - DNA, 1347 bp, Unknown
  Unknown gut bacteria
atgaagctgatactttcctttatgctgccgctggttttcggactgctgtttcagcaggtttacagtatggtggataccattgtggtggggaaatttctgggtgtggacgcgctggcgggggtcggctctaccggttctattacgtttctggtgctgggactgtgcaacggcgtgtgcgccgggtttgccattcccgtggcgcagaaattcggacagcgggattttgacgggctgcgccggttcgtcggcaatatgatctggctcggctgcgtcatcgccgcggcggtgacgctggtcacgacgctgctgtgccgccagattctcctctggatggacaccccggcggatacgttttcctatgcttacgactatattttcgtgatttttctgggcatccccgcgaccatgctgtacaatctcctgtcgggcattctccggtcgctgggagattccaaaacgccgctggtgttcctgattatgtgcagcctgctgaacgtggcgctggacatcgtgtttattctgacgctgaatatgggtgtcgcgggggcgggctgggcgacgctgctgagtcagctgatctccggcgtgctgtgcctgtatttcatcgtgaagaaattcccgattctccatttgaagcaggacgatctgcggctgcggaaaatctatgtccggaagctgctgaatatgggtctgcccatgggcttgcagtattccatcaccgccatcggcagcattctgctgcaaaccgcggtcaacggcctgggcgcgaccgccatggcggccatcgcggcgggcagccgggtgagcatgctccttgtctgcccctttgacgccatgggaaccaccgccgctaccttcgccggacagaatctgggcgcggggaagctggatcggattcaccagggggtcaaggactgcacggtactgggcattatcatctccgctgcgatttttgtgatcacctggtttggcggcagtgccatgaccacactgttcctggatacggcggacggggcgagcgtcgacatggtggtgccgatgggacagcagttcctgatcatcaacgcggcgtttgccattccgctgctgttcgtcaatctgctccgcttcaccattcaggggttgggctactcggagtttgcggtgttcgcgggagtgttcgagatggttgccagaggtgccttcgggctttgtctggtgccggtgcttggctatacagccgcatgctttgccagccccgcggcatgggtgatggctgatctgtttctgttccccgcttatttccactgcatgaagaagcaggggtattccttcaaaccgacgaaggccagtgcagcgacagaataa

SEQ ID NO: 250 - DNA, 1038 bp, Unknown
  Unknown gut bacteria
atgagcaaagaattcctttacaccctgcttgacagcatgtccgtttccggccatgagatcccgctgcaaaagaaggtcatcgccgagatgaccccccactgtgacaagatcatcacagattataccggcaacgtcgtctgcgtgctgaaccccgacgcgcccttcaaggtgatgctggccgctcacattgacgagatcggtctgatcgtcacccacatccagcccgacggcctgcttcgtgtgtccaagtccggcggcattttccccggcgtttatcccggccatcaggtggccgtccacggctatgcccagaccgtctacggcgcggtcgtccgcagcaaggacatggacaaggccgacctgaaagcggacgagctgtacatcgacatcggcgcgaaggacgccgctgacgcccggaaatacgtgcaggagggcgaccccgtccacatgaacacctaccatcaggaaatgctcaacggctttctctccgcccggggcattgacgaccggggctgcgcctacatcattctggaagccctgaaacgggcaaaggccatgggctgctccgtgggcgtttacgccgccaccaccgtgggcgaagaaaccaccggccggggttcccactgggtcggctctgccatccgtcccgacgttgccatcgtcaccgacgtcacttttgcctccgattatcccggcgtggatgccaagcagtccggcgaggtgaagctgggctgcggcggcgtgctctgcaacagctccatcggcagccggaaggtcaacgacctgctgaaagccgttgcgaaggagcataacattccctatcagatcgagtcctacatgggcagaacctacaccgacgcggacaacctccacgtcaccggcaccggcgtggtcacagcgctgctgtccctgcccctgcggtacatgcactgcccctgcgaggtgtgccacatggacgacatcgaaaactgtatcgagctgctggcgcagttcctgtgccgcatcgatgagcatattgatctcgacccctttcactga

SEQ ID NO: 251 - DNA, 3165 bp, Unknown
  Unknown gut bacteria
gagagctgctacacgcaggtcacaacaactgaaaaggaaattcttgcctgccccgtgtcagcggagagcgggcttgttgtcgtgcaccggcacgattcgcgctgctatgacgaagacggcatgcttgcatgtcctttgccggagcttgcggcgcatgtacataccgaggcctgctacgactaccccgaagcgcatgtccacacagatgcgtgctattcggaggaaagaggcgagctgatctgcggtttggaagaaggagaggagcatacccacacggacgattgctacgcgtgggagacggttttgtcctgcggccagacggaggaggagcctgccgagccggtgctcgtctgcggcaaaaaagagatcgttctgcaccggcacgacgaggattgctacgccgcggacggaacgcttacctgcgcgcttccggaagtgatcgaacaccagcacacgggaaaatgtttcaagaccgttcaggtccctgtggacacgcaggcgctcacctgcacgaatacggaccctgaccatgtgcacaccgcgctgtgctacggcacgtgggtcctgacctgcgatcagggaaccgacgacacgaccccggacacacctgcggacgaagacccggcggacgatcccggctccgaagacccggcagaggatgaagatccggacgatgcggattctgaagaccccggcgcggaagactccgaaaatcccgaagacccggagaaccccgaagacccggaaaatccggaggacgagcagccggaagacggcgcggacacctacgcgtccgagcagatgacgctgcggtactacgtttatctcgacggctcgctggatcctgttttggaggagtccagaacgctcgagcgggagaacggacgctattacatcacggcgcagcagctgcagaccgtgtacggcgattttggtttcgaggcggacagctatcaaggagaacgcttcttcccgcatactgatctgcacgacacatcgcttatctgggcggacgcgccggcgtatccggccgaaaacgcggacggaacgcaggaatggcgcattccgctcagccgcaccacaacaagctatatctactatctgccccacaacacgcaggactacggcagctactttgaaggcagtgcctccaacaccaatgcggcgctcatcagcgacaacacgttctacaccgtgaacatttccgcgccgcccgatgccgcgtcggagagcaagatctatcacgtactgaacggagcgacgttcagcgtcgagctgtctgtgttcgacgactacacctggagctacaccaacctcgccgatggcagcgagatcacgccgagcgatgtgcaggagctggaaggcggcaagcttttcatcaagttccggaacgtctcgcatcccatcaaggtcactgcgcgcaaaacgatcgccgacgaacagatctataccatccgctaccatgcagatacgctcgccgactgtctggaacgaatcagcagtgcggttagcgccaacgcgcagagcgttatcaccgacggcaaggtcggcggcatggcgacgcttaccgaacaggtaacggtcacggcggatacgatctatccgctccgttcgccggattcgctgcgcgtggtgtcgcaggcagacccgaccagacaggccaagcactatttctacaccttccgcggctggcgcgtcaaggcgaccaacaccgttctcgaccccgcgcagccgctgacggcggtgcagctggcgggctatgaaaacggcggcgtgatcgagctggaggcggtctggagtgtaaaagacgcaaatggcagagccacatccgtcaacttctttattcaccttttctgtgagatcaaggacttccacagcaacggcttcaccaacaacccggtcggtgactataccaagtccctgttcaccacgacgctgctcggaactgatgcactctcctcgtccgataaccttctggttcttgcgcctccgacgactgacgcaacggcctacgaaacggatgacatcctgcgcaccatgacggatacgccctacgatggcctgacgatggaagcatttccctctgaccgcgagatgttcgccctgctccgcgagaacaactacaccatcaaaatcggcaatagcacgatcccgcaaagcaagctgacttcagactattttcaggttcgctggaccaacctcaaatacgatatcagcgacggctggcatgtcgacggtgtgcttgtagcgaaggaagcaaagctccgcgtaacgaagacattcctcggaagcgccgcagccattgcaagcgttaaggcgcagaccggcgggatggaatacggaatccggattcaaaacacgacgacgaatgccgaagagctcctcctcacgctcaaccctgccgggcaggagcagcgcacggattgcgtgggatatgacgactacgatgccgccagcaatacctatacctggatcgtcagcgggcgcgtcgacagtatctatgcgctttccgagcagaactatcttttgcaggatgtgccgtcgacctcctattaccgcatatctgacatggcaaaaccgggtgactggcagaactatgacgctgacagtcagcccaccacggctatggtctcctacgcgacggataccccgaaaaacaggtaccgcacggtatccttccgcaacaagtatgtcgatgccggtacgttgacgctgcgaaagttcgactccttcacacacaatggcatcgcaaatgtggaatttctgcttaccgcagatgacggcgttagcggccagcatctgcaccgcaagccgggaacgagcatgtataccaacgccagcacctccggttcggaatataccgaagcgacggggaacaggatcgtgacggacgtgaacggtgacgcataccttcgcctgacacccggcgcatacacactgcaagagacattgccgaccggatacagcggagctgcggagatccggctcactgtcgacgaggagggcagcctgaccgcgctgacctttgacggcgcgccggccgcctcttcgcccggcggcgtggcatccggtgtgggaaccacgcttctggccattatgaatgattcgcaagttctgacgacagttaccgctgtgaaggattggggcgaggtgccggacgagtgg

SEQ ID NO: 252 - DNA, 1602 bp, Unknown
  Unknown gut bacteria
ctcaacaggcttgcgggtgacctgattttcagggacgagagcgggaacgatgtgacgcaggacgtccagggcaagttcacagtcacggaagcaagcttcaacgcacccggcttctttcaggcctattgcatcaccggcaagatcgcgatcaaggacgagtacgcgtcggaacttcagctgaacaaggagagcttcacgatcaatggcaaaatcgagaaggccaagcctgtcttgacgggtctggagttcaagcccaaaaaacagctttacgccggcgactcgcttggctggaactttgacaacaacaacctttcgggcggcacggccacgatcaccgcttacaacggaagcaccgtaacggttcccggcacgttctcctttgatgagggcgagcttcatcggggaagcccgctgaagggcggggagaaccgtcttccggtgcgatttgacccaaaggacgttgcaaacgtcgaagaggcagcctgcaaagtggttgtcaatgtgccctaccgcaattatgactgcgtcagcgcgtcgtatctctatcccgcatatggcacggcctttaaagatctgaacctgccggattccgtgaccgtcaacgcccggtatgacgcaagcgacggcggcgtgggcttcaactattacgcagacatcacgtgggatgcttccaaatacgacccgacaaatctcgacgaacagatcatgtacggcacatttgataggtcgtattgggaggactatatcgcgttcccggagggcgcggatgttcgggtcaagcttgtgatcaaggtgcagcctcccgtacaggctgagacggaaatcacaaagcttcctaccttccagtggacaaaaagactggacaatggcggcacgttcaagcttccggtaaacaccattttcctgtttaccaagtttaaagttggaacctactccgggcaaaccggcgcgctgaccggcggcaaggccagaattaagggcacggataccgagctttccggtacattcgccctcgagttcccctacgggcagacggaaacgttctacagcgaagcgggcacgaaggaagtaaccgtggtcttcaagccggaaaatagcctgttctatgccgaagcaagagcgacgctttccgttgaggcaatcaagctcacgctggcgaagatgtacaacacagtctccatcacggacaaggacgtgggaacgcagttcgcagatctggggcttccgacatctgtaggcttcgagacggaggacggcacggtgaagttcatctctgtggaatggaatgcggagggatatgacaggaattcttctgcggagcagaccattacgggaacgctgaaatacgactcgtttgacgaacgcgaactcaatcccactacgctcaccgcgacggcaacggtcaagctcattccgccggcgcatgtgcacgcctacacgcagaaggttcagaaggcggagaccctgaaaacgcccgcaagctgtacggaagacgaggtgtactacctgtcgtgcgaatgcggcgagatcagcccgaacgaggccgatgtgttcatcgccgaaaataccgccctagaccatgactttggcgactggacgtcg

SEQ ID NO: 253 - DNA, 708 bp, Unknown
  Unknown gut bacteria
acatgccaagcacgaagaaatccggggaaggggagtgatcctatcgcaatcacaagcgcgagcctgccatcgaaaaagcgcatcctgacggtctgcgtcaagctctttttggagcaggggtacaagaagacgacggtcgcacagatcgtccacgaggcgggcgtttccaacagcacgtttcagaatattttccgcgccaaggacggcgttctgacagagctcgtcgagttcatgttcggcaaccagtttgccatggcgcgccagacggcggggcagacgctgccgcccatctatgtctacgcggtcgagacagccattcagatgacgctcacagagctcaacgagaatttgcgggaaatttatcttgaggcctatacgcagaaggaagcgtccgagtatatcttccgcgagacggccaaggagatccagcagattttcggcgcgtaccagccggggttcacggcggccgatttttacgcgatggagctcggctcggcgggcatcatgcgcgcgtatatggcgcagccgtgcgatgaagcgctgacgctcgagcggaagatccagctgtttctgacgatgagcctgcgcgcctaccgcgtgccggaggaggagattgagaagacgctggcgtatatcgcggggcgggatatccgcgcggtctcggagcgggtcatgcacatcctgtttcagacgctcgccatgcgctac

SEQ ID NO: 254 - DNA, 810 bp, Unknown
  Unknown gut bacteria
aagctttcgggttacgtgcagttttatgcattctgtacggtgtggctcgaacaggacgggagctttgaagcgcactacgcgggcgctttggagcattttaaccgccagctggacgagaacaaagaccagatcgtccgctgcaaaaacgaagcggatgcgcgcgcggccatcgggagcggaaaatgcggtgcgttcttgtcgatcgagggcgcggaggccatttcctgtgaccccggaaaattagagcttgcctgcgcgcagggcgtgcgcatgatcgcaccggcgtggaacgcgcagaatgcgctgaccggaagctgcatgacaggcggaggtctgacggcacagggcaaagaattcgtgcgccgggcgcagaagcttggcatgatcctagacgtcagccatatctcggagaaagcgttctgggatctttgcgacatcacagaaaagccgtttgtggcgagccattccaattcgcgcgccatctgcaagcatgtccgcaatctcaccgacgagcagtttaaagcgttgtgcgaggcgggcggtacggcggggctgaatctctacggcgcatttttacgcgatgagggcaggccgacactggaagacgtctggcgtcatatcgagcattttttggagctcgggggagacggacatatcgcgctcggcggcgatctggacggatgcagcgtgctgccggagggctttgccggtgtggacagctatgcaatgcttgcgcagtggctggaagacaggaagctgccaagcagtacaatagaaaatatattcagtgagtctttattaaaggttgtg

SEQ ID NO: 255 - DNA, 2169 bp, Unknown
  Unknown gut bacteria
atggtttccggtcttgcgggcagcaagggtctgttcgacttcgtcggagcctgtgtgatcaaaaaccttaccgtttccggtgcgattaaagaaggcacaaacatgggtctgcttgcagacgtcagcgcaggtacggtagaaaactgcttcaccacgggttctttgcacagaatcaactcctacggcacaacaggcggcctcatcggacgcgcagacgcaggtacggtaatccgcaactgcggttctgctgcaaacgtcagctgctcgatgaagagcctgaaagcagagctcaacatgggcggtctggttggcaacctgtacggcacggtggaaaacagctacgcgaccggtaccgtcaaggtggaagcgggcagcggctatacggcggtcggcggcttcatcggccagaccaaaaacactgcggccattacgaacagctacgcggcaggtacagttaccggttctgcgggcggtgcgctcggcgcgttcgtcggtgtgaacagcggctcgatctccggcagctactaccgcgaggatgcggcagaagctgcggtcgcgaccggaagtgcagacggcctcacggcgatgacgaaggctgtcatgcagagcgatggcttcatcaaggatcatctcggtctggaacgctatcatgtcgacaccgacggcatcaacggcggctacccgatccacgcatggcagggcggcaaagaagcggaactgaccgaggacgaaaaggcagtcacgctcgacgttcgcgcgcttgtcctcaaagatgcaaaacaggcggcgcttgtacaggagctttgcgcgcaggtgcaggaggagacggacgcgtttgtcgcggaaacttccctgagtatgctccttacgtacatccgcgacgactggggctatgactgcggtgtattgacctcgccggaggacgcaaagccctacgtctatcagcagttctgcaaggaaaaagaagccgagtatctggaagaatacggcgagcagatcgacctgagcaacaccgagggcattttgacgcccgataacaacggcatataccatatcaaaacgcaggcgcagctggtgcttgcagcgacgggtgaaaacggcagccggatctcctggcattcggacagcgacgcactgaacgcggaaaccggcgcagtcacgctccccgaggcagacacgatcaccgtcaggctcaccgcgaccgcggcaaagggtacggcagaaaagagccgcgagatcactgttattctctactctgtgaaagctgaggccggaaacgtgctcggcagcatcgaaaaagcgctgtcggcaaaggatgcgtttgtccagcccgtgcagatccgcggccacgagacggcaatggacgccgtttcctactggttgtataacaacggctatgacgacagcatcgaggtcgaatttgtcagtgcaggtacgcttgcgacaacctctgttaccggccattcgtacctcgcagaagacggaaccgttacctattatcagggcgagggcggcacggacaccaagtatgtgacctacaccggcgtacagttcaagctttccaaactcggcgcagagaagacggttacggcgaacgtgcgcatcggctgggatgtggaaaaagcgcaggaactcatgcagagggcgctcgacgagcagctcacatgggaagccatccgcggcgaaaacaccaatacggcaaaggccagcacggataagagctttaccggcatggtcgtggacggagaagtttccgaaatgctcgtcgcaccgcgcacggtcacagtggacggcgttgcagtccgcgtcggcttcagtgtgaacccgtctgacgcggtgacctatgaatttacggacagccagatcaacatttcgccgcgccgtccgtcacagggcaaacctgccacaacgttcgagctgcggatggtcacgctgttcgacgaaaaccttgacccgtacacgatctctgccatgatgagcagcagcggcgacaatgtcagcacgctccagctccaaaacgcgttccgtattacggtaaagcccgagacagaagatgcgcagaatgtgctgtcgcagaatctcaaggataaactccccggtcttgtgaccaactactatgactacggcgcgaaggtcgacctgacgaagcctgtcaaggacgatctgctg

SEQ ID NO: 256 - DNA, 669 bp, Unknown
  Unknown gut bacteria
atgagtttgtttgtttcccagctgtttaacggattgcagacaggttctgtgtatgcgctggtggcccttggctacagcatggtctatggtatcatcctgcttctgaactttgcccacggcgacatcatcatggtcggcgcgtataccgcgttctacgccatgactgcgttccacctgcacccgattctctccgttgttctggccgttgtcacaagtacgctgcttggcgttgtgattgagaaggttggttatacgcctcttcgctcggcgccccgtctttcgcttctgatcacagcgatcggcatttcgttcctgcttgaaaacggtgcgcagcttctgttcggcgctgacaccaagagcatggacacgcttgttcccggcaatgtgtcgttcggctccgtcacgatcagctatactgcgatcttgaccatcatcgtcgctgtcatcgcgatggtcgcattgacgctccttgtccagaaaacgaagctcggaaaggcgatgcgcgcggtctctgaggatatgggcgcggcgcagctgatgggcatcagcctcaacaaaacgatctcatttacatttgcggtcggctcagcgcttgccggtatcggctcggttctgtatctttgcgcgtattcccaggcatcgcccacgatgggctcgatgctcggcctg

SEQ ID NO: 257 - DNA, 681 bp, Unknown
  Unknown gut bacteria
atgaacaagtacgaagaaattgcgcgctgcctcaaagctcgtattcggtccggcgcatatatccccggccagaagctgccctcggaggcggagctctgccgcgaattttctgcgagccgcctttccgtgcgcagcgcgatcggccagcttgcggcgcaggggctcatccggacgcatcagggcaagggctcctttgtctgtccgggcgcgccgtcaggggatacagagctttcctttcagggcgcttccatcagccggacggatttttttgagctgcgccggatcctggagacagagatcgcgggtctggccgcccaaagagccgggcaggagacgatcgaccgactgcgcgagctctcgtttcagatgcagcgcgccgagcgggaatcggagatggcggaggccgacgaggcgtttcatctgcttctggccgaggcctcacagaatgccgccatccgggccgtttttcagatgctccggccgtatatccacacgatgatggtgcagaacgtctccgtattgggcgcagacggctgtacggcgcatcttaaaatcgtcgcggcgatcgaggcgcgaaactccgaacttgccaagacccacatggcagagcacctcaaccgctccatggagcagacgaatatgctcaactatgtgaaaaagctggacgcaccggccgactga

SEQ ID NO: 258 - DNA, 1095 bp, Unknown
  Unknown gut bacteria
atgctggttctgctcggcgcagtggtgcttctggccgttgtgctgatcgtcatcatttccagctgctcgaagaaaaatcagggtgcaggcatcaccgcgcaggccttttccaccggctcggagctgacgcttccggtcaacaccgagctcaacagcggagactatgtctcctacggcgggtaccagtttgaaacagggacgaagctttccaagatggcaaagctcatcacgaaaaataacgagaacgtcacggccacaagctacgataacgcctacggctcggcctacctcttcacgcgcgacacaggctcaggtgtggaaagctggtgtctgtaccagaaggatccggcgcacatctccaagtggtacatcttcatgggcaaccaccgcgaggtcgagctggcggatggaacgctggatcttctcttgccgctccacctgatttccgacagctatctgcgcgacaacatgggaagcaagctttctctcggcacagcttacgcctgcggcacaaagagcgccgaccagacgatgctcgagcagttcaaggaattctacgcgaattccggcctctacaatatgatcacgctcgaaacaggcttcattctgacggataaagccaccggccgcgaggtcgagttcagctttgaagagaacgacgagtcctcgtggttcacgctcaagagcaccatccccgaagagcccgagccctcgagccgcgtccagctcagcagcaccgacgcagcctccacggacgagcccaccgagctttcggaggccgacgcgctcacgctcagcaagatcctgatcgatgcaaactacaagaccggcacgaccgcgtccgagtatccctataaggcaagcctcaatggtacggattacatgctggagctcacatggaaggacgacacctggtccgcctccgtccaaagcggcgaccagaccgcgcgccttaccaccaagcaggcctgcaccgtcgcggccattcttgcctccaatggcgtgatgaaggttgaaagcgacgagagctcgtggccggatgaggccggtaccgtcagcccgatgggcgcgtgcatggtcacgacaaacgacgtg

SEQ ID NO: 259 - DNA, 819 bp, Unknown
  Unknown gut bacteria
ttgccaaagctgctgttccagcgggtcgttgtggtgtcgctggctattttgctgcaaattttattcgtgattgcgggcatggattggctgcgcgaatactggcactggatgaagaccgcaatggacgtggtcaagtgggtcgcggtgctgacgatcatgaccggaagaagcaatccgtcgtataaaatggcgtggatcatcctgattctcgccttccctgtcgcgggcattacgatctatctgctcttcggcggcaaccgtatctcaaaccgcgagaaccgccgcatgaaccgcgtggaggtcatggttgcgcagcacctgcggcaggatcagaccgtcatgcaggcgctcgagcgggagaacattccggcatggaaccacgcgcgataccttctttcgagctcgcgctacccggtctatgataactctgcggccgtctatttcccgagcggcgagagctgctacgcgcggatgctcgaagagctcgaaaaggccgagcactatattttcctcgaattttttatcatcaataacggcaagatgtgggactccattctggaggttctgcaccgcaaggcgatgcagggtgtagacgttcgcgttctgtacgacgatttcggctgcatcacgcgccttccgatgcgctactgcaggaagctgcgcgagatgggcattgaggcgcacgtctttaacccgttcatccccgtcctttccggccggctcaataaccgcgaccaccgcaagctcatgctcatcgacggaaaggtgggatttacgggcggcgtgaacctcgcggatgaatacatcaacgaaatcgag

SEQ ID NO: 260 - DNA, 858 bp, Unknown
  Unknown gut bacteria
atgatagcactgaaaattctgcctgcgggcgagaaagcatacgaaaggaacggggctatgaagatcacatttctcggaacgggcaacgcgcaggcgacggcctgctacaatacctgctttgtcatggaggaaggcggcaagtgcctgctggtcgacggcggcggcgggaacctcctgttaagaagattacaggacacgggctataaatggcaggatatgcgagacaacatcgtcacccacaagcacatcgaccacctgctcggcatcatctggatgcagcgcatgatctgccagaacatggcgcgcggaaaatatgagggtgaggcgcggctgtatgcgcacgaggaggtcatccggatccttcatcagatggcggagatgctgctgaccgagaaggagcggaaattcattgacgagcgctttttcctcatcgaggtcaaagacggcgagacgcgcgagatcatcgggcagaccgtgcagttttttgacattcactctacgaaggccaagcagttcggcttcgcgatgacgctcaaagacggtcgtaaaattgcctgctgcggcgacgagccgtattgcgaagcggagtacgaatacgtcaagggcagcacactcatgctccacgaggcgttctgcctctattcccaacgcgagatttttgagccctacaagaagaaccactccacggtcaaagatgcatgcgagttggcggagaaactcggcgtgccgaacctcgtgctctaccacacggaagacaagagcatcgaaaaccgcaaggcgctctataccgaagagggcaggcaatattaccatggcagcctgatcgtcccggacgatctggaaacactggaactttaa

SEQ ID NO: 261 - DNA, 615 bp, Unknown
  Unknown gut bacteria
atgcaaaccggcatgtgggcggtgttcgccgcttcgttccggaaaaacctgaccgccattttcggtctggacggcaaaaccgcgcgtacggtaactgcgaacgcaaagcaaacgtatgcgcagattttaaaggagcttccggactttgagaagggcgaccggttcctcatgaatattgtcagctgcgcgatgctggccgcgttcgttctgagcatgccagagcgcccggatgtaacgcgtttgacctcgtattacgagcagtccatgatgacccccgccatgcggttttactgccgcaagagcggaagcaggcgcttttctcccgagagcctttcagccatggaaaaaactgcgcagtttcgcgccgcggaccggaacccgtattcctggaacatggactatctcccctatgccgacggctccggctttgaagcgcgcttcacggcctgcggcatctgtcagctgatgaaaaagcttgggctctacgatctcacgcccgctctgtgccacctcgactacccgatgaccgagaccggcggcacaacgaaatttgtccgggactacacgcttgcctccggcggcccctgctgcgactgcggctaccgcaaggtctga

SEQ ID NO: 262 - DNA, 990 bp, Unknown
  Unknown gut bacteria
gaaacagctgcgcccgcagccgaagaaacggccgccgagcccgctgctgctgaaacggcagaagaaacctctgaagctgaggaagcccctgcaactgaagaagcaaagacgagccttgacatcgtgttcatccccaagggcgttgcagactactggagcatcgttcaggcgggctttgaaaacgcggcgaccgagcttggcatgacgccgagagttgtctatccgtccaaggaagaagccggcgttcagatcgaaaccgtgatggacgtcatcaactccaagccggacgcgattgtccttgcccctgtgagcggcgacgcgcttgtctccgcctgccaggaaatccagaaggccggtattccgctgatcatcgccgataccgccatccccacggaggactatctccagtcgttcatgaccgataacgtcgccgccggcgcgatggcagctgacgagctggctgcgctgatgggcgaagagggccaggtttacatcttctccgattctcccgcgaaggcttccgttgccgaccgtgtgacgggctttgaggcgagaatgaaggaagcttatccgaacatcgaggtcctcggcaccctctacagcgaagcggatatcaacctctgcacgacccagtgcgtcgatgccatcacggcaaaccccgacatcaagggcatcttcgctgttgacgagaaccgcaccgcgggcgttggcaccgcgctcatccagctcggcagagaagacatctttgtcggcggcttcgacgcgaacaagaacaccgtttctctgatggaagacggcgtgatcaacttcctgactgtccagcagccgtaccagatgggctacatggcgtacaaggcagcggctgacgcggccaacggcgtggagctcgagcacggcatggtcgacaccggctgcaccatcgtcccgagagacaagctggacgacgaggacatgcaggccatcctcttcccgctggagcacctgaactga

SEQ ID NO: 263 - DNA, 1203 bp, Unknown
  Unknown gut bacteria
atggaacctgaaatcagtctttcgtgcaaagacttagtcaagacctatcccggcgttatcgccatggatcacatcaactttgaactgcgcaagggcgaggtccacgcgctgctcggagaaaacggcgcaggcaaatccacgctgatcaagtccattgcgggcgcgcaccagtgtgactccggcacgatcaccattgacggcaaggaatttcacagtctgacgccgcttcaggcgaaggaaatgggcgttgaggtcgtttatcaggaatttaaccagatgccgtctttatccgtcgcggagaatatttatctgaccgagctgcgcggcaagcgcattgtcgccgatcagagagagtttgagcgcaaggcagcggagcttttcaaggagatgaatctcgacctgaacccgaaggtcaaggttgcatcgctgacaaacggctacaagcagatggtcgaaattgcgaaggccatttccaagccgactaccaaaattctgattctcgacgagccgacggcgcctttgaccgtcgaccaggtcgacattctgttccggctgatccacaatctgaaggagaagggaatctcgatgatcttcatctcccaccgtatgccggaaatttttgagatctgcgaccgcgtgaccgtcatgcgtgacggcaagtcgatccagacgctgaacgtgaaggacacgaaccgtgaggagctcgtctctttgatggtcggccggaagctgaacgaaaacttcccgccgcgcgagacagaaatcggcgatctcgtgctcgaggcaaaggacctgtgcggcaacggcgtggagaacatctccttccagatccacgcgggcgagatcctcggctttgcgggtctggtcggcacgggccgtaccgaaacgctgcgccttgtctacggcgcggacaagatggactccggcgaggtttacatgtatggcaagaagcttcatatccgctcgccgaagcaggcgctggcgcatggtattgcgcttgtccccgaggacagaaagcttcagggcgtgttcctgcacatgagcatcaaggcaaacacgaatatttcgattcttccgaagatctcgaggggcattttcgtccaggcgcataaggaaacggaaaacgcggatcagtacatcaagagcttgcgcatccgtacgcccggcatgatgcagctggccggcaacctctccggcggcaac

SEQ ID NO: 264 - DNA, 786 bp, Unknown
  Unknown gut bacteria
ccctttgcctttacgggtaataaatttgagttccggatgcttggctcggccaactccattgcctgcacgaacattatgctcaacggcgctgtcgcgcagtcgctcaaaggttttgccgatgcgctagagaaggcagatgactttgaaggcgcgctgcacgatctcatccgccgcacgattcacgcgcacaagcgcatcatcttcaacggcaacggctacgacgacgcatggatcaaggaagcaaccgaacagcgcggccttctgaacttaagaactacgcccgacgcgatgccgacgctgctggaaaagaaaaacgtcgacatgctgaccggcctcaagattttcacgaaggcggagctcgagtcgcgctacgagatcatgatggaaaactacgtcaagactgtcaccatcgaggcgcagacgatgctggacatgacgcgcaaggagatcctgcccgccgttgccggctacacgaaggagctcaccgagacactggctgccaagcgcgcgatcttaccgtcgctgccggcaaaatacgaaaccggcacaatcacgaagctctcttcgcttctcgaccagatcgacgcggcggcagaggagcttgaaaaaaccacgctccagatcaaagccattgacagcgtcaccgagtccgcgttccagattcgcgacgcgatgctcccgagaatggcggcgctgcgcgtggtgtgcgatgaggcagagcctctgaccgctgaacgcttctggccgttcccgacgtacgacaagcttctgtttggtgtgagataa

SEQ ID NO: 265 - DNA, 864 bp, Unknown
  Unknown gut bacteria
atgaaaaagccgtccaagcccctgcacgcacgcggcgagctcaggtccgccatccggcgtcagcccgtcgtgtttgctgtctatctcgttctgcggctcatcgttcttgcgtcgctcgtgtcggccatcctccggcaggaatatgaaagcgcgtttgtgtgcgtgctggtgctgtttttgttcatgcttccgtttttcatccagaaaaacttcggcatctgccttccgagcacgctcgaaatcatcatcctgcttttcatcttcgcagcggaaatcttaggcgagctccagagctacttcatccagtacccctactgggacacgatgcttcacacgacgaacggctttctctgcgcggcggtcggcttttcgctgatcgacatcctgaaccgcgacgcaaagatcaagtttacgctctcgcccgtgtatgtggcgctggccgcgttctgtttttcgatgacgatcggtgttctgtgggagttctttgagttcgggatggataggcttttccacatggacatgcagaaggatacgatcgttcacaccatttcgtccgtgatgctggaccccacgaacagcaacattcccatcaccattgacggcattacctccgtcgcggtcaatggccgggatctaggctttcacgggtatctcgatattggcttttacgatacgatggaggacctgtttgtcaacttcatcggcgcgaccgtgttcagcgtgatcggttacttctatctcaagcaccggggcgagggcaaatttgcaaaggccttcatcccgaccattgaagaaacgaacaaggagcctgattctgaccatgtcaaagagccctcgcaggaagctgaaaatcgggacaattga

SEQ ID NO: 266 - DNA, 867 bp, Unknown
  Unknown gut bacteria
atggaactgcgcgtcttacgctattttctcgcggtggcgcgggaggaaaatatcacaaaagcggcggcgctcctgcatgtgacgcagccgaccctttcccgccagctcatgcagctggaggaggaactcggcgtcaagctctttcgccgcagtcagtaccgtgttgtcctgacggatgacgggatgctgctgcgccgtcgggcgcaggagatcgtggagctggcagacaaggccgaacgggagctgcagcatctcgatgcggaactgacgggcgagatcgctatcggctgtggcgaatccgtgggcatgacctttctctcggaacacattcgtgcgttccgcaggctgcaccgtcaagtgcagttccgtatttacagtgccaacgccgacgatgtgaaggagcgcattgaaaaggggctgctggacatggggcttctgaccgagccggtggacattggccgatatgcttttctgcgaacgccgcaaaaggaccgttggggcgtactgctgccaaaggagcatccgctggcacagaaaagcacggtcacgccgaacgatttgttgggtgttccgcttcttcttagcagccgcgaaagcgtccgcaacgagcttgcggggtggttcggcgatacatacgacaaaatcgaagttgcagccacatttagcctgattttgaacgcggccaacatggtaaaaaacggtgtgggcgcggcgctgtgctatgattttggaaatctctctgatgcgctggaatttgtgccgctttctccaaagctggaaaccggaacggtgttggcgtggaagaaggatcagacctgctcaccggcggcggatcaatttctcgactttctcaaaaatgcgatttaa

SEQ ID NO: 267 - DNA, 879 bp, Unknown
  Unknown gut bacteria
atgcgcgcattgaaaaccgtcggatatgtcatcagccataagaatggggagaaccgaagagcactttttccggcccagtgcacgcagctgaaatttccggagcaggcgatttttgagacgggctacggtcttagcctcggcttttctgacgcggactatgaacgcgcgggcgtgaagattgcctcccgggaggaggttttgcgggcggatgtgatcgtagacgtgaagctcggagatgcggagtatctggacgcgcttgtgcccggaaagatcctgtgcggctgggcgcacacggtgcagaagacggactttgccggaaaagccatccgcgcggggcatacggtcatcgcgcttgagcacctgcgggaaaacgggcggtaccttttttaccgcacccgcgagattgcgggcgaggctgcaattctgcatgcgttccgctattgcggcaaaatgccctacgactgcaaggtctgcatcgtcggcaacggccagacggccaagggtgcgatgcggatgctgacggggctcggtgcggaggtcgatatcttcgggcggaagatggaaaagacgttccgcaagctcatgttccagtacgatgtgatcgtcaactgtgtctattgggacacctcacgctccgaccggctcatctaccgcgaggatttaaagagaatgcgccccgggacgatgatcatcgatgtgagctgcgacccgtatctggagatcgaaacgtcccacccaacgacgatcgaccatccggtctacaccgtggacggcgtgatccactacgcggtcgacaacacccctgcgatgtacccctacacaacttctaaaattttcagccggaactttttaaaatatgccgatgcgctggcaagcggc

SEQ ID NO: 268 - DNA, 915 bp, Unknown
  Unknown gut bacteria
gtcagcatcgtcccgccgctgtcggttgcaatttcgagctcgtccgcaattctctcgtggaacattgagggcgacgcgccggagagctggactgtcacgatcacaggcgcagacgattactccgacacgcagatcgtttccacgccgtctgtcacctttgagggtctgaccccgggcgagacgtatgaggtcatcatctccacgcccacgatgctgcaaagcgtctcgacgtcgatcacgccgaacatcacgaagctctcctcgttcacagcgaacgtcgacggcgaagatttggtccttgactggacgtgcgaggtcgacccggcagagcccggctggacgctcgaggcaaagatcgcgggaatcgatacgcccgtcacacttcccgagacagaggaagcgcctgttcgcattccgctttccgatcttgtaccggacgcggactatacgttcaccgtagcgctcaagagcggcgaaaagctcgagggtgagacgaaaacgacgtatcactcccccgccgtcacggacaaatacaccgaccacggcatggcgggcacatatcttggcttcttcctgaagcccgcgaatgtggaaaccgtcaacagtacgaatatttccaccacgcgcaacaactattacaccatcaacgagcagatggcctttgcgctgcagacgctcgtgacgctcgacacaaaggcggaggaagatatcgccgtcatgcttgttgtccgcgacgaggcgggcaagcttgtaagcttcgaggagtcgcatcggcaatggagcacgatgtgggagaaaaatctcttcgtcggtacgctctcgagcatgccgcagaaagccggaacctacacgcttgaaatctacttcaaccataagctcgtcaccaccaaggacttcaacgtccgcgaatcgtaa

SEQ ID NO: 269 - DNA, 900 bp, Unknown
  Unknown gut bacteria
ctcctgctgcttctttgcgcctgtacatctgaaaaacaagcagatttacagccggagacgccggatatttcggaaagcgccgtctcctggaacgacctgacgtttgaccggacgcttccgctctcttacgccacgcagttttccgtcagctacgcgggagacgattatacccgcatcacgatcggaagcgatcaggagtttcttctggtggcagaaaacgccgagaccccggagcatattccggaacgcgtcaccgttctgcaccggccgctttctcatatctatctggttgcgtccgccgcaatggactattttgaccatctggacgcggtcgaccggatttccctcagcggcctcaaagcagacgactggtacatcgaaagcgcgaaggccgcaatggaagagggcagcatgcgctacgccgggaagtattccgcgccggactacgaggcgattttggagagcggctgcgacctcgccattgaaaacacgatgatctaccacacgccggaggtcatcgagcagctgcaaacgaccggcgttcccgttctggtcgagcgctcgagctatgaatcgagcccgctcggaagaatcgaatggctcaagctctacggcgcgctggtcggaaaagaggacttggcctgctcgcagtatgacgagctccttgccgcgctgtctcccattctcgatcaggaggcaagcggtcaaaccgtcgcatttttctacatcaattcctccggcgcggtcaatgtccgcaaatcgggggactacatcgcaaaggccatcgcgatggcgggcgggcaatatgtttcgttcgacgaaagcggcgaggaaaacgcgctgtccacgatgacgattcagatggaatcgttctacgcctccgctgtcgacgcggatatc

SEQ ID NO: 270 - DNA, 1041 bp, Unknown
  Unknown gut bacteria
tacagctatgatcccagcctcccggctgaggttcaggcaacgattcctaaggacccggacacctacactgtgggccagaaggtcacaacggcagctaagcccaattctgtgagagttggcgaaaatatctggacgttcaagacgtggaagcttgatggcgtcgaggttgcaccgaacacgcaggttgagatggtttccggcggtctgcactttgaaggcatctgggaggcgaaactgatccactacagcctgacaatccagtacgtcgataagaaggggaaggaactggccgagagccatatggatctcctgtccaagggtgaagcgtacaaagtagactctccgaagatcaagggctacaagctcaagaacaaggatgacgcggtgatcgaaggtacaatgcccggtcgtaatctgaccatcgaggtcgtctacatcaagaagagcaccggaggcagttcaggtacgatcgactccccgaacaagcctacgacgaaggcaccggcgctgacgctcaacaccgatgaccacttcgcgtttatcaacggttatcccgacggctccgtgcagccggaaggcaatgtcacccgtgcggagaccgcagcgatcctgtaccgcatcatgggcgacgagtgccagtcctactacaagaccaacagcagctcctattcggatgttgcccgcggcgactggtacaacacctacgttgctacactcgagaatgccggcgtgatcgtcgacaccagaacgaacggcaagttccgtccgaatgacgcgatcacccgcgccgagctcgcttccatgatcgcgcagttcgccggtctggagagcgcttccgctgcgaagttcaacgatgttggctcgcgctactgggcagccgaggaaatcgcgattgccgcgaagatgggctggatcaacggctatcccgacggcagcttccgcccggaccgcaacgtcacccgtgccgaactcatggcaatggtgaaccgcgcgctcggccgcacgccgaagtctgcaggcgatctgttgtccggcatgaag

SEQ ID NO: 271 - DNA, 903 bp, Unknown
  Unknown gut bacteria
atggaacagctctatcacttttccgcgcccggccgcacggagatcagcggcaaccataccgaccatcagcacggctgcgttctggccgccgcggtcgatatgcagacggacgctgaggttcgcctcaacggtacacacctgattttaatcgactctgagggcttcgcgccggtcacggttgacctcgacgatctgtccgtccacgaaaccgagaagaacaccacagcctcgctcgtgcgcggcgttgcggcggcatttcaggcgcgcggctgcaagcttcagggcttcgacgcgaaaatttcgtccaccgtgctccccggctccggtttatcgagctcggcggcctttgaggtcctcatcggcagaattttaaacggtctgttctttgagaacaagctctcggccatcgagattgcacagatcggccagtacgccgagaacgtctattttggaaagccctcggggctcatggaccagatggcgtcctctgtcggcgggctcgtgttcatcgactttgcggaccccaaaaagcccgtcgtcgaaaaggtcgactttgactttgcccactgcggccatacgctctgcatcatcgactcccacgcaagccacgcggatctgacggatgagtacgcggccatcccggtggagatgaaaaaggtcgcggccttcttcggaaaggaagtcctcaacgatgtggacgagagcgcgttctacgcttcccttcctgcccttcgcgcaagctgcggtgaccgcgccgttctgcgcgcgatgcactattttgaagagaatcagcgcgtccggctccaggtgcgcgcgctgcgaaacgacaattttggagcgttcctgacctacgtcaacgactccggccgctcgtcgtggctcaagctccagaacgtcacgccg

SEQ ID NO: 272 - DNA, 717 bp, Unknown
  Unknown gut bacteria
tatgccacgcagatggaggcgggcgtggattctgccgaccttctcatcgcggtgacgatgtcggacgagctgaaccttctttgctgcctcgtcgcaaagaaaatcggcgcgcggcacacaatcgcccgcgtccggaacccggagtatagcggcgaactctcgctcatctcggacgatctggggctgagcctttctgtgaaccccgagcttctgtgcgcaacagagatcgctcggacgcttcgtatcccgtcggctatcaaaacagatacgtttgccaacgggcatgtggaacttttaaaggtgcagatcccgcaggactcccttatcgcgggcaagacgctcatggagcttccgagcctcgtgaaggccaagatcctgatctgcgcggtcgagcgcggggagcaagaggtctatattccctcgggctcgttccggctggaggcgggcgaccgcatctcgttcgttgcgtccatccgcgacgcgcaggcgtttttccaccagatcaagctcgcctcgtcgcgcgtgcggacggtcctgatcgtcggcggcgggcacattgcgtattatcttgccaagcagctgacggacctcggcgttggcgtcaaaatcacggaggtcaactatgagcggtgcttgcagctctcgtcgcttcttcccaaggccgagattctgcatggcgacggcacaaacgaaggcttcctgcgcgagtgcggcgtt

SEQ ID NO: 273 - DNA, 2010 bp, Unknown
  Unknown gut bacteria
atggaggaaggtatgaagaagagaattgtctcgctggtgctggcgctggttctggtgctcgggctgctgccggggcctgtgatggccgcgtggcccagcttccggggaaacggaagcaacatgggcattacagacgtgcagacacccgcgcctgactatgcaaagctccaatgggcggctaaaatcggcacgtcggcggagagcatgacgacaagcaccgtctatgccgggcagccggtcgtggagggtgagtttgtctatgcgacggcggggcggacgctttataagatcaaggcgctggacggaaacgtggccgtgcagcaggtgatggacgggaaggaccgtttcggcacgatcccgccgacgatcgccggggacacgatctatgtggcgctggacggcggcatggtcgaggcattcaacaaggatacgctcgcgaagaaatggacgcttggcgggctttccgccggaggacagaacagctgcccggttctggtgtccgaaggccgggtctacacgggattttatgattcggagaccggcacacagaactatgtctgcctgacgacggcgggaaagcgcgtctggagctatgcaaacgcgggcggcttttactgggccggcgcggtcgcggtcggggactatatttttgtcggcacggacgatggcgcgaagagcggtgtgaacggaacctcgcgcattttgagcttccgcaaggacgagacgcgccaaaatcccgttccgcaggtgctcgagctgcaagaccttggcgaccagagaagctcgctcgcgtattccgaacagaccgggcggatttattttacgacgaagggcggctatctctgctcggcgaaggtggacggtacgaccggtacgctcacggagctcaggacctgccttctcggcatgggaagtacgagcacgccagtctattataagggctatgtctatgtcggaaccggcacaggtccggggccgagcggtgggtttgctattgtgaaggagaacgcgcagacgggtgatctgacgctccaaagggagctcacgatgcccggcagcacgcagggctcgccccttctgagcacagcgcgggaagcggaggggtatctctatttctatgaatgcgcaaactataagccgggcgggcttatctgcatccgggtgaacgcgaatcgcccggagagcacgaccgcgtcggacgtctttacgatctttgacgcggcggattatccggagtactgcgcggcaagcccggtctgcggagacgacggcaccatttattacaaaaacgactccggctatctgttcgcggtcgcgaaaacgcaggctccggcggtcaagtttacccggcatccgcagagcgcggcatatacgcccggaaagacggcacaggcccttacggtggaggcagtggcggcagacaatgcggcgctcagccatcagtgggagaagtcttcagatgaaaaaagctggacggccatcgaccgtgcgacgacgagcagctatgtcccggaaattccggcgaaaatcgagggcgagcaggtaacctattaccgctgcaaggtgacgtctaccctgaacgggaagacggcgtgggatgtgtcgcacacggcggccatcacggtcaaggcgctcagcgcggacacgacgatttcctatattgtgaccgacggcaacgaggaaccgacaggcgcaccgacggcggcttcggtcagtgaaacaacagttgtgctcaactatgcggagctgggggcgaagaaaccgcgcgtctggttccagccgccgcaaggcggcacgctgcgcgtaacgcttggtacgtgcgacgacccggcggcgcgctatgacggttcgggtgattataccgaccgcgtctacttccgaagtggtataacgggcacgaatatcatccgtgtcaccgcgacggcggaagatggcgtgacgcagacgacgtataccttcgttcttacgccggacggaaactatgacggcctgcggagcgtctatgtgacg

SEQ ID NO: 274 - DNA, 600 bp, Unknown
  Unknown gut bacteria
ttgtgttttcaacagcttttatggtatactataagcatattagaaatccttgccaaagaggtgactgaaatggaagaacgcggattcatccgggacatgctggatgtgaaggttttgatcctgtttgtggcggcgacggcgaagtatccgctgacgctgcagaagatctatgagctgtgctatcaggacgatcggctgagctattttgatgtgagtattgcagtgccgcagatggttgagagcggacatcttgagcagctggcggacgagacgtatgtgattaccgaaaagggacgcgagcaggaggaagtgacgcgcgactcgatcgcgtttcccgtgatgcagcgggcaaaagcggccgtggaccaatataacgcgaagacccgtcgcagcgagttagtgaaaagcgaggtcgttgagcaggaggacgggagctgcgcggtgcggatgtacttaagagacgacgtggggagccttatgaagctggagctgaccgcgccgagcaagacgcagggaagggttttgcagcgggcgtttgagcagaaggcggagatcatctataacagcgttatgaagcagcttctgcagcaggagaaataa

SEQ ID NO: 275 - DNA, 528 bp, Unknown
  Unknown gut bacteria
tacgagaagttctatgcggcgtttggcaggcatatcaaatacggcgtgctgaacgattacggcgcgaaaaaggagcttttgcaggacctgcttctttactggtcccacaagcagaacaagctcgtctccttcaaggaatatgtggacgccatgcccgaggagcagaagaatatttactttgcaagcggcgaaaatcggcagagacttgcgcagctgccgcagcttgagaagctgggggagaagggcttcgacgtgctgctgatgaccgacgaggtcgacagcttcgtaccgcagacgctcggaaagtatgccgaaaaggacttccgctctgtcacgcaggaggacctcggcctttccaccgacgaagaaaagaaggaagctgccgagcaggccgaaaagtcgaaggcaacgctggagtttgtgaagcagacgcttggcgacgatgtgaaggaagtgcgcctttctgaaaacctcggtacgcatcctgtttgcatggtaccggaagagggtatgacgtttgagatggag

SEQ ID NO: 276 - DNA, 2718 bp, Unknown
  Unknown gut bacteria
atggcttcattgtccgtattggtgattgcgctggtttttgattcggtcgatggtattgtcgatctggaaatttatatccaatatgtttttgcatcggcagtcgtgttgttgttttcttttgtcattctttacctgtttcgatttttcccgctggcaagatccggactgaactggaataatcgttcctcgatcatcattattaaaaagcatttcatggctttttttgccgtttccctgattgtttcgataatcgcttatctggtttttttatatcttgccagaaaccagagtgaaaaggttgatctgaatctggcgcggattgccaaaatgcaagtaaaacaggtgaacgactggcggaacaggcaggcttacctgtcggaaagatatgcaggtgatgtcaggattattcatgaggcgagaggtttcgaagaaaaaatgaaccggcttgggaaccgaatgaaaaacggtatcgctgacgagatcgggggagatcctgaggttcagagtattcacaagcttttttcgttgacaggacgttatgatcttgtcaatgtgctcaaatacaggcgggtctggatgggaccacccaaaaagataaaagacataaacggaaaatggctcaatgtgctgacgatgtatgtcccttttctgaaaatgaaacctgaaggcaaggaagcgggtatcaaaacgcattatgtcgatccttccgattcgctgattcccaggctttcggttttgccggcgatcggtatgtcatccagagtttttcttttcagccgttatggtgaagagattgttgttttgcgcaattcattgaatgaccatgttgtttatccattgaaactgagtgagtcgagtcgggaacaatggttaaagaaaatgagtgatggtgtacagggtattttccatgaactggattatcgtggaaaacgtgtcatcggttatgtagagaaaattcccgattcagactggtcgttgatgatcaagatggatgaacgggaagcgtacagtcagatccggcagatggcgtggtacattctttcgatcgcttttttgctgacggctatggccgggctggcactttttttcgtattgcgtcatcggcatatgcaacatcaaacggagcgattgaaaatgggattgaaacagaaagcgatacgtcagcactatgattatctgagcaagtttgccaatgatgtcattattctgatggatggagacggaacagttatcgaggcaaacgaccgttcggaaagaatgttcggcaaggtccgttccgagatgataggtgaaaatatcagaacggtgttcgatctgaaagatgatttcgctttcgaggaaaaatggaatgatctggaggaagaaaaaagcctgattttcgaagcgtatggacagcatacgaatggcagtatttttcccgtcgaaatcagttcgagggttatcgaagctgacggccgtctgtttatccagttcattatacgtgacatatccgaaaagaaaaaagcggaagaaatggtctggagacatgcgaattttgatcagattaccggtttgcccaacaggcggatgttttcggaaaggctgttttttgaaacacgcaaggcgcagagagcagggtcttctgtcgctctcatgtttcttgatctcgaccatttcaaagacgtcaatgatacgatgggacatggtgtcggcgatcttttgctgaaagaggcaagtgaccggctgagattgtgtgtccgcgagaccgataccgtgtcccggttgggtggagatgaattcactgtaatcctggccgatctgggagatttcaaggatgtggagagagtggcacagaatattcttgatgaactggcggaaccctttgctctggaaggacaaacggttcatatttctgccagtatcggtattacgttttttccggaagatgccaccgatacccatgatctgatgaaaaacgccgatcaggcgatgtatgccgcaaaaagtctgggaggaaaccagtatcattatttcacacagtccatgcaggaagcggtgatacagagaatgcacatgatcaatgacttgcatgtcgctctggaaaacaatcagttcgagacagtgttccagccgattgtcgatctgaaaacaggcgggatctgccgtgccgaagcattgatccgctggcatcatcctgttcgcggtgttatcaatccggccgcatttgtaccactggcggaagatacaggtctgattcaggcttttggcgactgggtttttcttgaggcggccagacaggctgcaaagtgcagacgatatatccccgattttcaagtaagtgtcaatatttctccggtccagttcaggaagggcggtattgataccgatgtgtggtttgcccatctgaagagtctggatcttccgcctgaagcgatcgtgatcgagattaccgagggattgttgcttgagattgacgaaagtattaccgatcagcttctggctttacgtgatgccggtgttgaagtcgcactggatgatttcgggacggggtattcttcactggcctatctgaaaaagctcgatatcgattatgtgaaaatcgaccagatgtttgtcaagaatctgtctgtcagcgaggaggacagggtattgtgtgaagcgatgacactgatggcgcataaactggatatcgccgtgattgctgaaggtgtcgagacacaggcgcagttgaagatgatt

SEQ ID NO: 277 - DNA, 996 bp, Unknown
  Unknown gut bacteria
atgaataagcctaaagttgtattgactcattgggttcacccggaaattatcgaattgctgcgggaaaaggctgaagtcgtcgccaatccgggccggaaaacacttccgagagaggtattgctggaaagggcgaaagatgccgatgccttgatggctttcatgccggactgtattgacgaggcctttctgaaggcctgtcccagattgaaaattatcgctgcggccctgaaaggattcgacaattttgatgtggatgcttgtacccgtcatggtgtatggctgactatcgcaccggatctcttgacgattcctacagcagaactgacagtaggcctggttctgggtatcacaaggaatatgcttgagggtgacaggcatatacggagtggacaatttgccgggtggcgcccggaactttatgggctcggattgtacgggcggacagccggtattgtcggtttggggcttgtgggcagagctgttgctgaacgcttgaaagggtttggcatgaatctggtttattctgatgaaatttcactgccgcctgatgaagaagaacagcttgggcttacgaaagtgaccttttcaggattgctggattcaagcgatatcgttatccctttgctgccgttgacggaccggacgtttcatttgtttgacagaaatgcattggcaaggatgaagaaaggcagttatctggtcaatgcctgccgtggctcggttgttgatgaaatggccgttgtcgaatctcttgaaaagcggcatcttgcagggtatgcggccgatgtttttgaaatggaagactggattcgtccggaccgtccccgttcgatcccgaaggcattgctggagaatacggcgcaaacatttttcaccccacatctggggtcggccgtagatgatgtcaggatagaaattgaacgttattgcacccggagtatttttcaggcactggatggcaaaattcccgaagggaaggtaaatgatatctgttga

SEQ ID NO: 278 - DNA, 1599 bp, Unknown
  Unknown gut bacteria
ctttatcaaatattgagtgcagacattgcagaacagcgtggtcttgatgtgtatgcttatgagaccatgttggatgtcgcaaaagaaactgcagatcctcgtcttgccagaagagcggctgagatcgctgtcaaaaatagaaacataaaagatgctttgcaagcagtacgcctttggcacaaattggccccgcaatctgaagaagctcagaagtatttgctgggatttctggtgctggacaacagactggatgaggtcaaagattatttttcttccagactggctgcggcaacaccagagaaacgggtagcgctgttttatcagcttcagcagcttctcgcaggaaccaagaacaaatcggatgcttttgcgataatggaagaagtcgcggcaccgtatcaggatatacctgaagcacatctatcgctggcagtatccgccttgatgaaaaacgatcgaagcagagccagagatgaagttcaaaaagcacttgttttaaaaccggattccgagatggctgtgttgacatatgcacaagtttcttccaataccagtgaggccattgatatcctttctgcatttttgctgaaatatccggagtcacgcgaagtaagaatttcacttgcccgtttgttgctgggacaaaagaagtatgaaaacgcaagacaggaattcgagatattgctgaattccgatcctcaggatttgatggcgctctattcgcttggattattgtccattcaggaaaatgactatatttcggcagaaaaatatctggaaaggtatcttggaacatcttctgctcagtccacggagaatcgtcaggaattaatacaggttctgtttttgctgtcccagatagcggaagaacagcatcgatatgatgaatcacttcagtggctttcccgaataaacccggatgaggatgatgaggttgcattgggtgtggagatcaggaaagctcagatttatgcaaaaaaaggaaatgtcaacagggcaaggaaaatcattacggatttggcgaatgaaaatccttatgaacgggaaaaattgttgctgactgaggcacaaattctgaaagaagtcaaaagaacaaaagatgctttcaatgttctcaagtcgggagttgcgcaatttccgcagaataccaatattctgtacgactatgctttggccgcagagaatctggggaaatacgggatcatggaagaatcattgaaacggatcattgaaattgatccaaattatcagcaagcttataacgctttggggtattcattggcagatcgtaatcttcgactggatgaagcatttatactgatcgataaggcaataaaactggcacccgatgacccttatattatagatagtcttggttgggtttttttcagacagggtgatcttgatttagctgaacagaatttgcgtcatgcctacaaattgcgatcggacaatgagatagcaattcatcttgccgaggtgttgtggacaaaaggaaatcggcaagaggctttgtcgcttttcagtaaagtcaaaaagaaagatcctgataatgatctgttgaattcaactttgacacgtctgaaaatcaaactttag

SEQ ID NO: 279 - DNA, 1347 bp, Unknown
  Unknown gut bacteria
atgaaaattcgaaaatttttctatggtctgatgtttgtccttttctgtgtacaaaacggggcatatgccgaaccggcaaaagagttttatcttgaaaacggtatgaaaatcattgtcaaggaagaccatcgggctccggtagctgtgcatatggtctggtatcgtaccggatcgatggatgaaacgaatggaacaacaggcgtcgcgcatgttcttgagcatatgatgttcaaggggacaccgaagtatcccgaaggtagcctgagcaaaacggtcgcaaaactcggaggtaaagacaatgcttttaccaatactgattacacggcttattttcagcagatccccaaaaacagtcttgagaaaatgatggaaatggaagcggatcgcatgagtaatctgcagttcgcgaattcggatttcgagaaggaaatccgcgtcgtcatggaagaacgacgctggagaacggatgaccagccggaaggacgtgtcgatgaagcattaagagcggcagcctttgtcgcccatccgtatcattggccggttatcggctggatgaacgatttgcagaatatgactgttgaggatgccagaaactggtatgaaagatggtatgcaccgaataatgcgatcatggttgtcgtcggtgatgtcgatgcctttgcagtcaggaatatggcgaataagtattttggcaagatccggcctaaaaaaatcgttccggtcaaaccccagctggaaccggagcagcttggtcctaagcgggttgctgtttccgcacctgcagaaaatccgatggtcgtactggcttataaggtcccggctttgagagatgtcgaaaaagatgacgatgtttatgcactcgatgtgctggcttctgttctggatggctacgataatgcacggcttccagcttctttggtgcgcaaggaacggatagcgctgtcggtcgggacagattattccgccctgtcgcgtggtccggcattgtttgtgttacaagggattcctgcaaaaggtgtgacggttgacgagctggaaaagcgtttgcgtcatgaagttgccagtattgcgaagcatggtataaccatggaggaattgcaacgggtgaagatgcagttgatttcgtcgcagatttacaaacgcgattcaatgttcggacaggcaatggaaatcggtgtttttgaaatgaccggcatcggtcagaaacggattgaccatgttatcgggaagctcaaggaggtgactcctcaacaggtacagcgagtggcgcaaaaatatttcacggacaatgcattgacagtcgcaacacttgttcctgaggttttgcctgatacaaaggttaaatga

SEQ ID NO: 280 - DNA, 1488 bp, Unknown
  Unknown gut bacteria
atgaatgcgatgaacctgattcccgccatacccgaactgatactggttgtatcggtgccgcttgttttgctgatcgatctgtttttgccgcaaaacagaagggatatcacgtttttcctgtcgattctggcgatttgtgcctgtgcagtggccagtttcgtccttttgcgtgaaaaggcggtcgtgtacacctttgccggggcgttcgtgtcggatactgtggcgaacctgctgaaattgtgtacctgccttgccatgctgttcacgctggtttattcacggcgttatatcaatgaaaggcgaatgacggtcgggcatctgggaggcgagttttacgtgctggcgctgttttcgatgctcgggcagatggtggtcatttccgccgccagcttcctgaccctgtttctcggaatcgaactgatgtcttttcccctttatgccctgatcgccctgaagcgcgatgacgggagggcggtcgaggcagccacgaaatttttcattctgggagcgcttggttccgggcttctgctgtatggcatttcgatgttgtacggggctaccggatcgctggatttcatggaagtggcgaggatctcggcttatgccggtacgaactggctgattatggttttcggagtggtgttcgtcgtggcgggaatcgctttcaaactgggcgctgtccccttccacctgtgggtgcccgacgtttttgaaggctctccgtcagctgtgacgcttctggtcgcaggtgcgccaaaactggccggtttcgcactttgcatgcgcgttctggtggatgcgttgctgcctctggcatacgactggcagcaaatgttgatcgtgatttctgtcctgtcgatggctctgggcaatattaccgccatattgcagaccaatatcaagcgtatgctggcctattcgacgatagcccagatgggatacatgttgctggggatgcttgccggtgtgaaagacggccgtttcgggatggagtccgttttcgcctacagtgcatccctgtattacactatcgtgtacgttctggcgacgcttggcgcgttcggtgtcattctggtgatgtccgccaatggcgccgaggccgaaaaactggccgatttccggggactgaaccgtcgtaatccctggtatgccctgatcatgttgttgtgcatgttttctttcgccggcgttccgccactggtcggtttttacggcaagttgtccgtttttcaggccgtcgtcaatgtcgatctgttctggctggctgtcgtcggcattttctttgcggtcgtcggcgcgttctactatctgcgggtcgtcaaggtcatgtatttcgatgaaccgccgggtaccgggaaaattcatgtaccgaaggacatggcggttgtgcttggcatcaatggtgttctggtactgttgctcggaatcttgcccggaccgctgatggactggtgcatgagtgcggtccagcgcgcgtttctgatgtag

SEQ ID NO: 281 - DNA, 1224 bp, Unknown
  Unknown gut bacteria
caggaaaaaaacgacgacaagaaccagtttggattattcaatgaacctgctttccagcaaggtgaatttgtcggaaaacaaaaatatgaaacggtactgaccgaaaaacagcttgataactggctttgtaaaatcgatcgggccgaactgacttcgttggacacggaaacgacttccctggattccatgaaagccagattggtcggaatttccctttccgtcgaaccaggtcttgcggcctatattccgctcgcccaccgtacgattgaacctgtcgaacaattgcccgttgattatgttctgggaaaactgaaaaactggcttgaaaatccctgcaaaaagaaagttggccagaatctgaaatatgactgtcatattttcgccaattacgacattcacctccaggggatcgagcatgatactttgcttgaatcctatgtactggaatcgcacaggcgtcatgatatggacagcctgtctgagcggttactcgaacataaaccgatcagctatgaagaaatttgtggcaaaggcgcttcacaaatcggtttcgatcagattgaactggattgcgcaacagaatatgcggcggaggatgctgacgttacactacagctccacaaaaaaatgtggccacaaatcgaaaaaaacgagggattacgtttcatttacgaaaaaatcgaaataccgactctcgttgtcttgcaaaaaatggagcgtaatggtgtccttattgatccagaacgtcttttaggacaatcttcggaactcggaaccaaaatggacgaactggaaaaaagcgcatatcgggccgcagaacaggcattcaacctgaattcaccgaaacagctggctgaaattctttttgacaaactgggacttccaatgatcaaaaagacaccgtccggtgcgccttccaccagtgaagaagttcttgaaaaactgtcgcttgattatcccttgccaaaaattattctggattatcgtggcatgtcgaaactgaaatcgacttatacagacaagctgcccagaatgatcaatgccgaaacaggaagagttcataccaactatgcgcaagcagttgccgtcaccggacgtctggcatccagcgatcccaatctccagaacattccggtaaaaacagaagagggaagaagaatcagggaagctttcatcgccccggcgggaagttatattgtctcagccgattattcccagatcgaa

SEQ ID NO: 282 - DNA, 1047 bp, Unknown
  Unknown gut bacteria
atgacacaagacaaactcatcggtcccggaaaaacatttcttatcaataccttatccaaccagagcatcctggctatcctcgctttgctggctgtattggccattgtcttcatcgttttgcgactgaaacgattccgcaacaatatgccattgcacatcgtgcgtgtctctatcgcttttttttcactttatctaacaggcaaactgctctcacagttcattgaattgcatgacatttcaatagtcacaccaaaagaaatcaatttcctgtttctggtcgccatcgtcgcacttgccatcagggaatgcttcctttttgcagatcacttcagaagacatctggaaaataccggaaaaaatgccacttcggcacaaatcattacccgggttataaaaatcgtgtgcgccatttccattctgctcatgttcggtgaacaattcggcctgagctttgccggattattgacattcggaggaataggcgggattgccatcggtctggcgggaagagatattctgagcaatctcttttcgggaatcatgatctatttcgatcgtcccttcaatatcggtgactggatccggtcaccggatcgcaatattgaaggaacggttcttgaaatcggatggagaaccacaaaaatcatgacgttccagaaccgcccgctttatgtcccgaactatatattttccacaatatgtgtggaaaatccgggaagaacacgaaactggcgcatcaaaacttccataggcattctttgtgaagatgtcgacaaaataaaagttatcgtcggccaaatccgggatatgttgaaaaagaacgataatattgaccagagccagaccttgctggtgaatttcaatcagatcggagacttttccctcaacattctcgtttattgtttcacgaaaacgactgtctggagtgaatggctgcaaatacaggaagacgtttatctcgaaatcatcaacattgtccagaaaaacggttctgacctggcatatcccacccgcaaggtttttctggaacagatggcgaagcaataa

SEQ ID NO: 283 - DNA, 1008 bp, Unknown
  Unknown gut bacteria
cccgccacattgccggagagtgtgttaatgcaggctgccgctgagatgtgcgactggcatggatgtcgtatgtctgccatggagctgagtcatcgtggtgcggaatttggcaggatcattgagcgggcaaggaatgatcttcgcgatcttctggaaattccggaatcccatcgcatacttttcatgcagggcggcgcaacggccatgaatgcgatcattcctctgaatctcgtcaatcgtcccggctcaaatgccactatggatttcgtgcacacagggatatggtccggaaaatcgctgaatgaagcgaggaaatatgggcatgtcaatattgtcgcttcatcggagaagagcggattcctgtctgtcccggaaagaagtgtctggcatctgtcggacggtgccgcctatattcatgtctgcacgaatgaaacgatcaatggctgtcagtttcattttactccggataccggtagcgctccgctcgtggccgatatgtcttccgagattttgtcccgtcctgtcgatttctcgatatatgatgtggtttttgccagtgcccagaaaaatctggggccggcgggggtgactcttcttatcgttcgggaagatctgatcggatatgcttctccgttttgcccgtccgtttttgactggaagaatgtcgtggaaagcgattccatgttcaatacgccaccgacttatgccatttatatctgtggtcttgttttcaggtggctgaaaaaacagggaggggtttccagaatggaacgtgaaagcatcgaaaagtcgtctttgctttatgactttatcgatcacagtgatttttatcataataatgtcgaaacaggcagtcgatcaaggatgaatgttcctttttttcttgaggatgaatccttgaatgacaggtttgtcatggaagcttctgcacatggtctgttccaattgaaaggacatcgcttgcagggagggatgcgtgcatctctatacaatgccatgccgatagag

SEQ ID NO: 284 - DNA, 726 bp, Unknown
  Unknown gut bacteria
accgaagtcattcacgatttcagaaaagaagacttccttgcggccgtccggaaaacaaaggaatacatcgccaatggcgattgcatgcaggtcgttttgagccaacgcctgagaaaaccctatacggactctccattatcgctttaccgctccttaagagccctcaatccttcgccttatctttattactaccatttcgatgaccttcacatcatcggttcctcgccggaaattctggttcgccaggaaaatacccctgaggggcgtaaagttattgtccgtcctcttgcagggacacgcccgcggggagctacaccggaaaaagaccgtcagctcgcatcagaactgctctcggataccaaggaaatcgccgaacatgtcatgctgatcgatctggcccgtaacgatatcggacgaattgccaaaatcggcagtgtcaaagtcacggaaaaaatggccatcgaaaaatattctcacgtccagcatatcgtttccaatgtcgaagggcttctgaaacctggcctgtccaatctggatgtactgaaagcgacttttcctgccggtacgctttccggcgctcccaaagtccgcgccatggaaatcattgacgaaatggagccggtaaaacgcggtatttacggcggtgcctgcggttatctttctttcggcggagaaatggatctggccatcgctatccgcacaggtgtcatctataaaaacatgctt

SEQ ID NO: 285 - DNA, 645 bp, Unknown
  Unknown gut bacteria
atgaatgctgataccgaaattttcttcgtatctggcaatgccggaaatcttgaatgtgcgcttgatttacccaaaaaaaagccggttggtattgcccttcttgctcatcctcatcccctttatggcggtaccatgaataacaaggtagtccagatgatggcacgatcttttattggcctggggtttctggcggtcagaatgaatttccgtggagtcgggaagtctgaaggtgcacatgattttgggaacggcgaaacggaagatatggaaaatgtgctggaacatatgcaaagaaaatatccgaacttgccggttgtgctgggaggcttttcatttggcacttatgttcagtcacggttgcagcaacagatggttttaaagggcaatccgcctgaagggatggtttttgtcagtacgacagcggggaaatgggccgtggagaaagtgccggaaaatacccttctgattcatggcgaaatggatgaggttgtgccgctgtccgatgtcttcaattgggcacgtcctcaggatctgtccgttgtcgttgtcgcgggtgccgatcatttgttcaatcataaattgcatcatatccgtcgtatcatcacgaccgctttcaagaatcggcaagaggccggaaatttctga

SEQ ID NO: 286 - DNA, 1737 bp, Unknown
  Unknown gut bacteria
atgagtgcgacaacagacgattcactgaaattagggagtgcgaatacaggtaccatttcaggtggtcatcttgtcgcgaaagcgcttagaaatgaaggaatcgacacgatattcaccctctccggaggcaatatcgtggatatatatgacggttgtgtcaatgaaggcatccgggttatcgattttcgccatgaacaggtagcagcacacgccgctgatggatatgcacgccagacagggcagacaggatgtctggtcacgacagcaggcccggggtgctgtaatgccataaccggaatggcgacagcattgcgatcggaaacgccacttctgcatattggtggccaaggtgccacttcccagtatttgcagggttccttgcaggaattcgatcatgtcagactgatgtctcccgttaccaaatgggcggcaagtgttcgctcgactgaacggattgccgatatggtttccatggggtgtcgggaggcatggggcgaagttcccggtccggtctatcttgaaataccccgggatcttcttgatcgcagtattgaactgcaagattgcgtcattcccgcagctggtcattaccgtttctcctgtaaagtgatgtgttcacctcccgagatagaaaaactggcggatctgttggtccatgctgaaaaaccggctgccctgttcggaagtcaggtatggaacggaagaagtcatcgggaagcgcttgaggtgatcaggacttttgatattcctgcctacacgaatggttctgcccgcggcattttcagaaacaatgacccgctttcctttgacaggacacgtgacaaggcattggccgaagccgatgttattctcgttgtcggcacacctttcgatttcaggctgggttatggcaagtcgctgaatccggcagccaaagtcattcagatagaccaaaattattcggtaatcggcaaaaatcgtgatattgaactgggtctgctgggacatgccggtaccattttcagagcggttgtggatgctgtttccggaagtgaaaaacggaaaatggcaacgaagcgaaaagaatggattgcaacgcttcgggccgcggaagcagaagcacttgaaaaactgatgccattgttcaaatcggagaacagtctgatcaatccgtaccgggtggcatatgaactgaacgagtttcttgaggaaaacacgatatatgtcggagatggcggggatgtcgtgacgatctctgcacaggccgtacgtccccgcagaccgggacaatggatggatccggggcctttgggaagtctgggggtcggtacaggtttcgctattggagccaaactggccaatccggacaaggaggtcgtgtgctactatggtgatggcgctttctccatgacggcgttcgatatggaaacggccaaccgcttcaaggccccttacctggcagtggtcggtaacaactcggccatgaaccagatccgatatgcacaactggccaaatatggtgatcgtggtaacgttggcactttgttaagtgacttgccgtatggtaaatttgcggaaatgatgggcggctacggtgaggaagtctacaatcccggagatattgcgcctgccttgcggcgtggacgtgaggccatagccagaacgggcaagtgtgctgttatcaatatctgggttgacccgcaagaatggtcgccgggaaccaaggcacgtttgaaggcacgtatggccggcaaatag

SEQ ID NO: 287 - DNA, 1464 bp, Unknown
  Unknown gut bacteria
atgaaatatcgtgacttaagagactttgtcgaccagcttgcccaggaaaaggatgtgaaggaaatagagattcctgtatccccttgtctggagatgacggaagtttcccgtcgcgtactcgtgcaggatgggccggcactgtttttcaaaaatccggaagggtgttccatgccggttttgaccaatctttttggcagtacgcgacgcattgccagagcaatggggaaagagacaatcggcgatttaagaagcatcggacagttcctcgcttccctgaaggaacctgaacagcccaaaaatttttctgaaatagtcggcatgggcaccatgctgaaatctgttctggatatgcggccaaaggaacgcaaggacgctcgctgccatgaaatcgttctggaaggacgtaatgtcgatcttgatgcgttacctgttcagacatgttggccgggagatgctggccccctgattacatggggactggtcgtgacaaaggggccatgccggaaaaggcagaatctcggggtttaccgacagcaggtcattggcccgaacaaggtcattatgcgatggctgccgcacaggggaggggcacaggatttcagggatcacacgatggtgaatcgtggaaaaccctttcctgtcgccgttgtgatcggtgcggatccagcaaccctgctgagtgcggtcatgccgatcccggatgaattgtctgaatatcagttcgccgggttgttgagaggggggcgtacggaactggtcaaaacgattggaagcgatttgcttgttccatcaaatgccgagatcgttctggaaggatacattttgccggatgaaaatcatggatcgggatatgagcatgcacttgaaggtccattcggcgatcatacaggttattacaatgaaaaggactggtttcccgtcctgacggttgaccggattaccatgcgcagaaatccggtctatctttcgacatatacggggcggcctccggatgaaccgtccatgctgggactggctttgaacgaagtttttattccgctgttgcagaaacagttttctgaaataatcgatttttatctgccggccgaaacctgcagttaccggtttgccgttgtcaagatcagaaaggcttatccgggacatgcacggagaatcatgtttggtgtctggagttatttgcggcagtttctctataccaaatttattatcgtcgttgatgaagacattgacatccgtcggtgggaagatgtcctctgggcgatttcaacccgtgtcgatccggcaagagatacggttctggtagaaaacacaccgattgattatctggattttgcatcacctgtcagtggtctggggggcaagatgggaattgatgccacagacaaatgggcaggcgagacatgcaggacgtgggggaaaataatccggatgtcagatgatgtgcagaagaaagtggatattatt

SEQ ID NO: 288 - DNA, 1080 bp, Unknown
  Unknown gut bacteria
atggcactatttacaccacagcaaagacaaaccgcactatggaccggtatcggcatattgctcattgccattctcctgctgcttggcccgatcctgacccccttcattgccggttccatactggcatatgccttgaacccgatcgtcgaatggctgcgttcaaaacgcctgggaaatctcagaatgcctcgcatcatcgccgtcatcatcgtcatgatgctgctattttccgtcgtgaccgctttcgcactgatcatgattcccatgttgatccgcgaatggcccatgcttcacgaacagattcccgctttcatcgccaaagtcaacaattacctgaatcccatactcaacgaactcggcatccaggtcccggcagacaatgccagcatcaaacggatactgaccgaacaatttgtcccgaaaggagacggtgtctggaaatcacttattgcctctgcaaaattcggcggcactgcggtactgacatgggcatggaatctgattcttattcccgttgtacttttttaccttttaaaagactggcacatcatgatgcgcaagctgagagacatgatacccagacgatgggtttccaaggccgtcagtttctcacgggaagtcagcagcatgctggcccaatacctgcgtggacaattactagtcatgatgatactttccacttactattcgattgctctggcactggccgggtacaacgttgcattgcctgtcggcatcatgaccggcatgctggcattcattccttatatcggtatctgtttcggactgggtctggccgccacggcaacccttttgcaatttaccggcatggaagcctggatcacactcggtatcatttatggtttcggctactctttcgacggtctgctcatgacacccaagctggtcggggaccggattcagcttcaccccctgattgtcattttcgccctgctcgcattcggccagctcttcggctttgtcggcattttgcttgccctgccttcttccgctatcctgtcggtcgcttacagacaccttcgcagttattatttcgacagtaatttttacagaaactga

SEQ ID NO: 289 - DNA, 1536 bp, Unknown
  Unknown gut bacteria
gactatatcggcattttgcgtgcagccctgcacaatctggtcagcaacaacaggcaaggcgcttcgacaatcacccaacaggtcgccagaaattttttcctgacaagtgagcaaaccttcaaacgcaaattgtacgaagttctgctggcctggaaaatcgaaagaacgctgaccaaagaccagattctcgaaatttatctgaaccagatctatctgggacagcgtgctttcggtttcgcttccgccgcgcaggtctatttcggaaaacccctgcaggacattaccctggctgaagcagccatgctcgcagggcttcccaaagcaccttcggccaataatccgatcaccaatccgactcgcgccaaacagcgtcaacaatatattcttctcagaatgaaacaactcggttacgtcaccgatcaggaatacgagaaggcaaaaaacgaagagatcaaagtaaaaacaagccgcaacgaattcagcgtacatgcacaatatgtggcagaaatggtccgtatgatggtatacgatcaatacaaggacgaaacctacacacgcgggttgaatgtctatacaaccattacacaaaaagaccaggaagccgcttatcaggctgtccggcgcggagtaatggactacgacaaacgtcatggataccgcggtccggaaggatatatggaaatcccggcagccagggacgccatcgctgacgctattgaggatgagcttgcgaaatacccggacagtgacggcatcctgcgtgcggttgtacttgaggcatccccgggaagagtccgggccgttttatcatcaggcaacgaaatttccgtcactggaaacggactgaacttcgccgcttccggtttgacttccaatgccggcagcaacaaacagatccggcggggctcaatcattcggctcgcccaggacatacagggaaactggaatatcgttcagatgccacagatcgaagccgccttcgtttctctgaacccgaatgacggcgccataaaatccttgataggcggatttgatttcacgcaaaagaaattcaatcatgtcacacaagcatggagacagcccggttcgtctttcaaaccgttcatctactctgcctcactcgataaaaacctggctccagccagtattatcaatgacgcccccgtatcgttcagtgggcagacaaacgggcaaaactggactccgaaaaatttcgattcaaaatatgagggtccaataaccatgcgtcgcggattgatgaaatccaaaaacatgatttcaattcagatactgaatcagatcggcgcacaatatggccaggaattcatcacccgatttggctttgatcccgacaaaaatccgccttatctgacattggcactgggggccgggtccgtcacaccgctacagatggctacggcttattctgtctttgccaatggcggctataaaatcagaccgtatatcatttcccatatcaccgattccgacggaaaaatactctcccaggcacgtccggaaaaagccggagatgaa

SEQ ID NO: 290 - DNA, 1257 bp, Unknown
  Unknown gut bacteria
cgctccgaactggaaaaaaaagtcgaaatgaaaaagacccgtctggaaaaatggacgaaatccggtttcttttctcctttcgcactttatttgggatccatttcaattcccgcattgattctttcaggtctcatggtcttcggcaccggaatcgaaaatctccctgtctggcttggattgatgaccggtctgtgtgccctgatcgtttccagtcagcttgctgtagccgtcgccaactggttcagtgcctttccctgcgcgacaaatccgcttcccaagatggatttttcaaaaggcattcccgaaggatacgacacgcttgtcgtcgtaccttccatgttgatcagtgtagaacaagtcgaaaacctgtgcggtacactggaagtccattatctcgccaaccgggataaacgactgagattctgcctgctcaccgatctgactgacgcggagacggaaacgacacctgacgatatcgttctgatcaaccatctgacccatctgatcaatgaactgaacggcaaacacgcttctgataacacgggtccgtttctggcgttgagccgcccacgacactggaatccgggaatcgggaaatggatcggatacgaacgaaagcgcggaaagctggaagaactgaaccgttatctgaaaggctgcgacgaaaacgacttcaccaccagaatcggcaacatcgaaaatctcgaaaaaacccgatatgtcatcactttggacagcgatacccggttattgcgcgattccgcaagacaattcgtcggaaccatggcacatcccttgaacgcaccgaaatttgatgccatgaaagaccgcattaccgaaggttacggtatcctgcagccccggatcaccaacagtctgcctgccggcaatgcatcctggtatgaaaaactgtgcagcggtgatgcagggatcgatccttacacccgcgcagtttccgatatttaccaggacattttcggtgaaggttcgtttatcggaaaaggaatttatgatgtcgatgccgtctatgcaaccttgaatggaagacttcccgaaaacagtatattgagccatgatctgctggaaggttgttatgcccgttcgggtctgctaagcgatggacaactgtacgaacaatatccctcgagttacctggctgatgtaaaacgccgtcatcgctggatcagaggagactggcagctgctgaaatggttgttcgctttcgttccggacgtccgaccggaaaacagaacggga

SEQ ID NO: 291 - DNA, 1296 bp, Unknown
  Unknown gut bacteria
atgattccccatttagttaccgcactgaacggacctttgcatgaactggaaaaaaccattatcgactcgacaccctccattgaaagatggttcaggctggaatggcaggatcatactcctccattctactgttcagtcgacttgaggaatgccggtttcaagctggcgccagtcgataccaatctttttcctggcgggtttaacaacctgtctgttgaaatgctgccgctggctgtacaggccaccatggccgccattgaaaaatactgtccggatgccaaaaatctgcttctgattccggaaagtcatacgcggaatatctattacttgcaaaatattgcaagactgatccggattttgcgtcagacaggccttaatgtccggctgggttccttatcggaagatatcaaggtaccgactccgtttactctgccggacggaacgacgctgatgctggaacctttggcgagaatcaataacggacgccgcgtcggcgtgggggatttcaatccgtgtacgattcttttgaacaacgacttgagttccgggactcccgaaattctcaaaaatgtttatgaacagagtcttttccctcctttgcatgcaggctggactgtccgtcgcaaaagcaatcatttcgctgcatatgacgatgtcgccaaacggttctccaagatgctgggaatcgatccctggctgatcaatccgtacttttcaaaatgcagtcatgtcaatttcggcgagcatgagggtgaggagtgtcttgcggcgagtgtccattccgtactgatcaaaatccgaaggaagtacaaggaatatggtatcaaggaaaaaccgtttgtcattgtgaaagcggatgcaggaacatacggtatgggtatcatgaccgttacggatgcaagcgaagtcagggaactgaatcgcaagcagcgcaacaagatgtcggtcgtcaaggaaggtcttcccgttcgtgatgtcattattcaggaaggcgttcattctttcgaaagagtggatgacgctgtcgccgaaccggtcgtttacatgattgaccggtatgtggtcggtggtttttaccgggttaatgaaaagcgcgatatcaatgaaaatctgaatgcgccaggcgcgcatttcgttccgttggccttcgcacagcaacatacgttaccggacagaagtgcggaaccggggacgacggcacccaaccggttttacatgtatggggtgattgcacgtctggcattgctggcggcttcggtcgaactggaaaaaaccgatcccgacatgcaatcgtga

SEQ ID NO: 292 - DNA, 1290 bp, Unknown
  Unknown gut bacteria
atccccgttactgacattacgaccgaagtggaaaaacgtttgaaagaacgtgcacgtactgccaaagctccaggtttcaggcctggcaaggttccgatgaagatggtcgcgcagatgtacggcgcgcagatccagaatgaagtcatcaatcacaaagtgggagcggctttcagcaaggctgttcaggacaatggactccagattgcgggtgctccgcgttttgaggaaaaaacaggtgatgatgttgcgcaggacgaagtggcgttttatgccattttcgaagtttatcctgaagtcaagattggcgatctgggaacgattgagctggaaaaagccgttgccggtgtcacggatgccgaagtggacagaaccattgatatcctgagaaaacgtcaggcacactttcatgtcaagggagaagacagtgaacacggaaaaggtaacggcagcgttgtggcggaagatggcgaccgtgtgacgatcgattttaccggtcgtatcgacggtgttgaattcgaaggcggcaaagcggaaaacttcccctttgtcctcggcgaaaaacagatgctgccggaattcgaggatgctatccgggggatgaagacaggtgaaacaaaagtctttccactgacttttccggaaaactatcatggcaaggatgtggccggtaaaacatcggaattcactgttgaggtcaagaaaatcgaatgggcacatttgcctgaagtcaatgaggaatttgccaaggcgcttggcgtcaaggatggcagtgttgaaaaattgcgtgaagacatcaagaccaatctgcagcgtgaagtcaagaatcgcctgatcgccatcaacaagaatcgtgtcatggatgccttgatcaaggtgtccgaattcgatattccgcaatcgctggtcaagcaggaaatcggcgaattgaccgagttgacacgacgggatctggctgtccgcaatccgtcccacaaggatgttgccttgcctccggaactgtttacggcacaggctgaaaaacgggttcgtctgggcatgattctgggcgaattgatgaaagacaatgttctggcggtctctgctgataaactgaaagaaagagccaccgaaattgcttccagttacgaaaatccgcagatggtcatcgattattatctgaatgaacccggccgccgcaaggagctggaagcgatgctgatggaagaaaacgcgatggattatgttttcggcaaagccaaggttgttgagaaagaagtgccgttcgatgaactcatggctcagcaaatgtaa

SEQ ID NO: 293 - DNA, 753 bp, Unknown
  Unknown gut bacteria
cgcgaacctttgcggcggtcatccgtctcgaaacagggggcggacacgcggattaccgaacagcccggttttgtcctgcacagttatgtctaccgtgaaagcagcctggttgtcgatgtctttacccgtgattatggccgagtggcgctggtggcgaaaggggcaaagcgtcccgcttcccgtctgagaggtgttttgcagacgtttcagccgctttcagtcggctggtccggcaaatccgagttgagaaccctgacatcggccgaatgggtcggaggcatgattccgctggacagttccgccttgctgtacgggttttatctgaatgagctgctgatcaggctgctggcgcgggaagacccacatcagggactgtttgagcagtatgtccgggcactgacacgtctggcgacttccgaatccgcacagacagtcctcaggattttcgaactggcgctcctgaaggaaacgggagtggcggccgatttgtcgatcaatgcaaaagaccggcgtccggttgagccggaaggtatttatgtcgtcgatccggaaaacggtccgcgtttcgcgacgctggaagacacggcgccccgtgtttcgggcaaaacgctgcttgacatggtcagcgaggattattccgatcctcagacccagttgcaaagcaagcttctgatgcgttttctgctggcccatcacttgaacggtgttcccttgcagacacggaaaatactgatagacctgcgtcagctgtga

SEQ ID NO: 294 - DNA, 894 bp, Unknown
  Unknown gut bacteria
gatgatttcatcgcttttgccgccgagccgaaagaagacgattctcccgcacggttttccatcaataacattcaggtcgaaaacgcggttatcgagttcgacgattttccgcaaaataaacatcatgtcgtcgatgaactgaatgtttccattccattcgtttcgaccattccttcacaagtcgatatttttgtcgatttggcgatcaatgggcgattcaatcaggaaaaaatcgagctgacggggaaagcaagaccctttttcaaagacaaggatggaaccgtcaatatccggctggacaagatcaatttgccggcttatgcaggttatctgccggtcaagccggatttcgacctgaaagacggaaagttgtccatcgacatggaagtcgggttcggtcagcgtgcagaaggtcagcaaggacttactcttgagggaaatgttgtcctggaatcgttattgttggccgaaccggatggcaaaccggttctgaaaatcccggaaatgactgtccggattgcccatagcgatgtgctgtcagggaaattcgacatcggccaggttctgctgaaaggacctgaagtgtatcttgaccgtaacagggcaggacaatggaatgtcgaacgggtcgcgaggttcagtcctgcagacaataccggaaaaaatcatgtcggagcggcagcagatgccagtgcgggaaaaaaggatagccggccattttccgtcagtctcggaaaactgtctgtcgaaaacggagagcttcgggtcagtgatcagatccatgtcgttcccgctgatttttcggtcagaaatttcgcgctggatgtagatggcattgtactggatgttgcggagaaaaacgtgacggttgacaggatggtgtctgccggaact

SEQ ID NO: 295 - DNA, 1245 bp, Unknown
  Unknown gut bacteria
atgacgtataaaacccgattcaagtttctcgttctggctctggccggctgcttcaccctttcggccccggcatccgttttcgccagcgacatttcccttccgaaatacagcaaagacgcccagctcgccgcctttcattccgcagccgacctcgatctcatcggtgacgacgcatacgacgacgatcccctgacagaaattctttccatcaacgaagtcgatgtctggggaagaatccgctcgggtttcgccatcgccgatctggacaatccgctcgtcgaaaaccacatgaattatttcgccagacgtccggactatttccagagaacgacgcaacgcggatcgaaatacctcttccatatcgtgcaggaacttgagaaacggaacatgccgacggaactggctttgcttccgtttatcgaatccgcctacaatccccatgcccgatccattgccaaggccgaaggtctctggcagttcatccccagcacgggacgccattacgatctggcacaaaacgctttcaaggacgaaagaagggatatcatttcctcgaccgaggcggcgctcacctatctgcaaaggctccatgacatgttcggagactggcagcttgcgctggcgtcctacaactggggcgagggatcggtcatgcgggccatcaaaaaggccgaacgtgcgggaaaaccgatcaccttcaacagcatttccgcctacatgccggctgaaacgcgcaattacgttccgaaacttcaggccgtcaaaaacctgatcaccaatccacgccgatacggcatcgatcttcctcccgtcgaaaaccagccttacttcgtcacgatcggcaagacccgtgatatcgacgtcaaggtagctgccagactggccgaaatgtccctggatgattttcgggcactgaatccccagttcggtccctatgtcatcgccggcggcaacgaggtcaaaatactcctgccgaaggaaaacgccgaaaagttccggaaaaatctttctctctggacacgaccgctgtcttcatggacggcctatcaggtaacgagcccgcgggaaaaagtcgaagacatcgccgcccgtctcaatatctctcccgacgtaatccgtcaggccaacaacatcccatccagaagcgtcctgaaattcggatcggccattctggttccgaaaacggccggttacgatcgtgacatcgctcccgaacttgttgaaaacgccaagctggcctgggaa

SEQ ID NO: 296 - DNA, 849 bp, Unknown
  Unknown gut bacteria
ccccccccagccgataacgttgtcctggtcaagataccggaaatacccgttgacgatctgatcgaattgccgatcatgctcaatcttgaagaaagtcttcgtgcggaaaaaatcctgcctcatcttcagtctttgcgatataccggcagcaagcctgtccgctttctgggaatgccggacaataacgatgtgcccgaaaagaactggcaggcgattgtgcccggaaacagttatcgccacctcaaggcatgtgtgcaactggccaatcgtaatggtgccttgaacgaaatagagtattcggaactgctgatgcgtttgcgccagatcgccgatgctattggcgccgaacctgaagtgccggaaatgtcggatgttattgaaaaggcaggacaactctatcagttcgtcgccgatcacgatgccaagctgggtatcagtatacggagtaacggagcaccgtggcagatcgtaaccctgaaaaccgcgcttgaaaaacagggttttgaatcaaggccagatggccagttcgtgatgaaagaccgtgaaaacggcggaattctgttttctctttcaaccaatgagcttcctgcgtctgaaacggccacacggctgacattgctgatggatgtgccctgtattgcccaggaaaaggatggtttcgggcaaatggttcaatgcgggaaagcgctctgtatccgtctggatggcgctctggttgatgatggcaaccagatgttgacggacaaatttctggatgagatttcagggcaggtcaacgatttctacaaggagatgcaggaatcatctgttcctgccggatcaatccgtgccttgaagctgtttaactga

SEQ ID NO: 297 - DNA, 966 bp, Unknown
  Unknown gut bacteria
gcgtatgtcgatagccagacgccggaagaaattgcgaaaaaccggggcagtttctccgagccgggaaaaaattccccttatcgtgaacgtccggcatccgaatcgctcgatcttttccggaggatgaaagcgggtgaatttcccgatggagcgcatgtcctgcgggccaaaatcgatatggcgtcacccaatatgaacatgcgcgatccggttatttaccggattcgtcatgcccatcatcacagaacgggtgacaaatggaatatttatccgatgtacgattatacgcatccgatttccgatgcactggaaaacatcactcattcgatctgtacgctggaattccaggatcatcgtcctttctatgactggattcttgaacggctcacggaaacgacgacgttaccggacggtcgtgtaatcggagggtttttgcagaaaccgttacctcaccagtatgaatttgcgcggctgaacctgacctataccataaccagcaagcggaaactgttgcaactggtggaagaaaaaatcgtggatggctgggacgatccgcggatgccgacgatcgtcggtatccgtcgccggggctacacgcctgaatccatccagcttttctgtgaacggatcggagtggccaaagccgatggctggatcgacatgggtacgctggaaggcagtttgagggatgatctcgaccccaaggcgcccagggccgctgctgttttgcatccggtaaagctgattatcgataatttcccggaacatctgcaggaagaatgtacatctccggttcatcctcattatcctgaacggggagtgcgccgtttcccgatcacgaaggagttgtggatagaacgcgaggatttcatgattgatcccgtgaaagggtatttccggctattccctggcaatcgtgtccggcttcgttacggttatgtcgttgaatgtaccggttacgatatg

SEQ ID NO: 298 - DNA, 681 bp, Unknown
  Unknown gut bacteria
atgacgcaggctatcgattcccaaaccgttgcacaatatcttatcgaccaccccgaattcttcgagaatcatgccgacatcctttccggtttgcgcctgattagcccggtcatcggcaaggccgtctccctgcatgagcgccagatcgaagtattgcgaagcaaatacaaaaccctcgaattgcaactgtccaggctgatgcacacggcacagaacaacaagagcctgatggaaaaaatggtagtctgggcctcgagacttctcgaaaaacgccatgaaaccgatgatatgccgcaaacggtcgtcaacagtctcgaatccgttttcaatgtgcccgaaacgacattgcggctctggaatatccgggaagaatacgcggacagctggtttacccggcatgtcgatgaaaacatccgcaatgccgccaaccgcatggaacatccgtattgcggaaaagtgccggaaaatcaggatgctgtcaaatggcttgatcttttctcctcgatccgttctgtcgccctggtaccgctgaaaaaagacgcgcaatcccttccgttcggtctcattgtaatgggatcgcccgatgccacccgtttccagaacgatatggccaccgattttttgtctgctatcggagaactggccagtgtcacactccgtcatctgctggtgaccggctga

SEQ ID NO: 299 - DNA, 921 bp, Unknown
  Unknown gut bacteria
atgaaagttattctggcccaaccccgaggattctgcgccggtgtcaaacgtgcgatcgagaccgtcgagcgtgctctgtctcttttcggcaaaccggtatatgtccgtcacgaaatcgtccacaacacttacgtcgtgaaccgcctgaaagaaaaaggcgctgttttcatcgaagaactggatgacgtccctgccggcagcgttctgatcttttccgcgcatggggtttcgcaggcgatacggcgcgaagcggaaaaacgccgtttcagacttttcgacgcgacttgccctctggtgacgaaagtccatgccgaagtggccaaaagacggaaagacggccatgaaatcgtcgtgatcgggcacaaggggcatcctgaggtggaagggacgctcggacaggcggattcaggcatgtatctgataaacgacctgaacgatatcgcgacactacaggtcgaaaatccggaaaagctggcctatgtctcccagaccacgctatctgtcgatgataccgccgaaatcattcattccctgaaaacccggttccctttcattgtcgagccgaaaaaagcggacatctgttatgccacaaccaaccggcaggaagcggtcaagttgctggccaaaaaagccagcctgatcattgtcgtcggcagcccgaacagctccaattccaaccggttaagggaaatggccgagaaaaacggggcaacggcccatatggtggacaatgcatcgcaaatcagcatggactggcttgccggtcacgaatatatcggcgtcacggcgggagcttccgctccggaaattctcgtgacggaagtcgtcgatctgctcagacgggctaaagcggaatcggtgacggaaatgcacggcatggaagaatcgctggtttttcccttgcccaagggactcaaatag

SEQ ID NO: 300 - DNA, 1608 bp, Unknown
  Unknown gut bacteria
atgtcgaatgatgcctttgccaaactgaatgcccagcaatatgaagcggtccactatatggatggcccctgtctggttctggccggggccggttccggaaaaacgcgtgtcattacgcagaaaatcgctcatatgataggcagtggccagtatgaagccagaaacattgcggcattgacctttaccaacaaggcagcggcagaaatgcaggaacggatttcccgcttgctgaaagagccctctgacgcttcacagttgacgatttcgactttccattctcttggtgtgaagattctgcggcaggaagcgaaagaactgaatctcaaggaccgtttttccattcttgacagtgatgactgtttttctctggttcaggatcttgccgttaccactgacaaacaggttatccgccggattcagggtacgatatccttgtggaaaaacggaatggtcgatccggaaaccgctttgaaaagtgctgtggatgatgaagaagcacaggctgcacgcatataccggaattatgtggcgacgctttccgcttatcaggcggtggatttcgatgatctcatccggttgccggtcgagctgttccgttccagtgacagggtacgtgaaaaatggcaaagacgattgcgttatttgctggtggacgaatatcaggatacgaatacctgccagtatgagttggtcaaattgctggtatcgggaatcggaaaaaaaccgatgttcactgccgtgggagatgacgatcaggccatttatgcatggcgtggtgcgacgatcgagaacctgaaaaccctgcagaaagatttcagcgatcttaaagtgatcagactggaacagaattatcgttcttccatgaggattcttcaggcggccaatgccgtgatcggtaataatccgaaattgttcgaaaaaaaactgtggtccgatcatggtctgggcgaaccggttgaaacactggccatgtcggatgaggaacaggaagcggaacaggttgtcatgcttttatcggctcacaagttcgaacggcgggccagattttcggactatgccattctttaccgggggaattatcaggcccgtatattcgaaacggcattgaggcgggaaaatattccttacaccatttcgggggggcaaagctttttcgcccgtgccgaaatccgggatatcatcagttatttacggctgattgccaatctggatgacgatccggcttttatccgggctgtcaccacacctcgtcgcggtgtcggacaatccactctcgagacgctgggggcttttgccggccaatggcagtgttcattgtttgaagcggtatacaagggggggctggaagccaagttgtctcctcgccagctgggaccactgcgtgggttttgtgattttattaacgggattgaggaaagggcaagtcgtcccgggttatcggccaaaggcgaaaatgctgcggcactgctggatgagctgatgcacgaaatagcctatgaaacctatctttatgataatttcgacgaaagaacggccaaaaacaaatggcaaaatgttcttgaatttacaaactggctgaaagaaaaaagcaaaggcggcaaactggaa

SEQ ID NO: 301 - DNA, 1302 bp, Unknown
  Unknown gut bacteria
atgaaaaagatactaagtatattttgtttagcactactactcggagcctgctcagacttcctgaaagagtactcacaagacctttccaaggtggagagctacacggatctggatgaacttctgttgggagacgcatacctgccagtaggtcgaattacgatcgaaaacagtatgtttaaaagagaaaactcatatttccaaaccgtacattacatgtccgacgaactactcaatttccagttaaccgataatggcggatatcatggaattcaagaagaaatgttcggctggcacacgtggcaacaagatgtcggtttaaatgccgaaggaaattctcggggtgccgaagatgcggattggaatatcgcttaccatagcatcaacacatgcaatatgatcctggatgccattgatgaacaacacgccgaaaacgaggaacaggaactggaaaaaaatcgaattaaaggagaaacccatttcttgagagcgttatattatttcacgttagtcaacctgtacgggcaaccctactccgaaaccaaccgcacatctcccggtgtacccctaaaaacaacatcctacgtggaagataaagaatacaccatgaattcggttgatgaagtgtacacgcaagtactgaaagatcttgacttggcggacacctgtctggtaaacacaacaattaaaaaccacccttaccgcgcagacatcaccgccgtgtacttactgaaaagccgcatttacctgtacatgcaaaactgggaaaaagcccttgaatacgcgcaaaaagtgatgacaaagaataaaagcttactggatttaaacacattgacaacggaaacgggagacgtgttaaccaaatcatcaccggaaaccatcttctccatgggaggacatttattagcctcttccctcatcatgaaatatggagaaaaccggtggggagactgggaagccttaccttcctacacgatctcggacgatttagtggcagcttttgacgaaggagagaatgatttgagaacccaatactacattttcaaaacgacactgggagacgactattatgcgccctatgccgatggctggctctttcgtaaagttcgcggatgggaatacgggtacaaagaagtctcagataatttcctgttccgtacagctgaagcctatctgaatgcggctgaagctgcggcttatacgggagatgaaggaacagcccgtaacttgttaaaagaattacgggattaccgcatgattgacagtagatccatcacggaaagcggtgaatccttagttacctta

SEQ ID NO: 302 - DNA, 1734 bp, Unknown
  Unknown gut bacteria
atgattttccaaatagcaaaaaatgaattgaggaatatgttctgttccccgatagcttggcttgtattgtttatatttgcagtacagaccggaattgaatttacgggaagtatggctatggaagttcgggacagtgttatgggtgttggtttatatcgagtgacggcaaattgttattccggtataaggggtttattttcttcgttgcaaggttctttgttcctgtatgttccgttattgacaatggggttaatgagccgggaaaggagtagtggttcgattaaattgttgtattcttctccggttagtaatagttcgattattttagggaaatatatttctctgttgatttataatctaatactgatttgtattttattgatttatgtatttctcggattatgtattattgaaaatgtagatttttggttaccgttttcgggacttgtcggtttatacttgatagtttgtacttatgcggctattggactgtacatgtcatctattacttcttatcaagttgttgcggcattggggactttagccgtgttggcgattctgaattatttgccgtctttaggtggaaatatcgaggttgtgcaagagatcacgtattggttttcaatttcaggaaaagctaatcaaatgatcgatgggttgatctgtagtgaagatttattttatttctttattgttattgggttgtttctgtctttatctgtattgaaattgcattctgaacgaaaagtgatttcaaagtctcgttgtattgtaacgtgtattggtattctgacgtttgttcttttattggaatatgtttgtactcgtcctgcttgcatgtggtattgtgatgtcactcaagataagtcgaggacgcttagtaagggaagtcaagaggttatgaaagcattagacggaggtttaacaattacaacctatgtaaacttgttggatgatcatcgttggcaagggttacccgctaatcgtgtgtatgatgttcgtggttttcggcagtttactcgttttaagccagaaattcagatgcgttatgtctattattatgatcaaacagataatccgatactggataagttgtatccgaatttgagcatggaggaacgggcaagagaattggcacgagtagaagatttggattttgataaattcctttctcctgaagagattcgggagaaaattgatttgacttcggaaggtaatcgttttgtacgtttgttggaacgggaaaatggtcgtaaaacatttttgcgaatttataatgatggacaagctaatcctggcgagagggaaataattgcagctttgaagagattaacgattgttcctcctaaagttggatttttgacaggtcatgatgaacgtagtattcggcaggttggcgaatgggattattcggcttttgccgcaaatattggtttccggtattctttggtaaatatagggtttgatgtcgaggaggttgatttaagagatacgatacccggagatattcatgttttggtaattgctgacttgaaaaagccgttgacagatgacgaacaagagtatttgcaacgatacgttgataaaggagggaatttatttattttggcaacagccactaggcaggaattgttgaatcctgttacacgttcgttaggtgtttattttgagcctggaattttggtgcaaaatcataaacagcatcagcaagatttgattttaggagaaattact

SEQ ID NO: 303 - DNA, 2361 bp, Unknown
  Unknown gut bacteria
ttgacttattatatccgccatacggcagcccaaccgggatatgctgattattatcttgtgcagaatgtcggttctttgatggaagacgaggaccaaaatgggttagctcatgtgttggaacacatggcatttcatgccacggaaagttttccggaaggagtgccggcttttttgcagcgacatgggattgaaacatttaatgccgttacgaggtatgatgaaacgatataccatgttgatcatgtaccgacgatatcctcggaattggtagattcttgcgtgttagttttgcgggattggtccggttttctgatgttgaagccggaagatatggatcgggagcgtaaagtgatccgggaggaacgtcggatcagaatgaatgtatctaagcgagtacagaaaatggcagagccttacctgtacaacaggagtaagtatgcccttcatgatattatcggttccgtagaggtagtgcaaaattttactccagagcaacttcgcggttattataacgatttctatcgtccggatcaacaggccgtgattattatgggggatattgatgtcgcacgggtagaggctacggtgaaacgtttgtttgaggtcattcctaaaagagaaaatccgaaacccaggcttgtttatagaattgaggataatgaagagcctttatatgctaagttaattgataatgaaattcctaataattcaatccagttagtgaaacgtatccctcgtcctcgtgtgaattctttggaagagatgttgcgagagatgttgctgcgagatttttacaattcgattatgaggggatatataacggaatatgtagaagcgggagagtcttatcttttgggggctggtgcatggatttctagtttggtgagaaattatgatagttttaatttggtattgacctcattaccgggaaaggaaagggaggctttgcaacaagtattggagcaggtcgaatatgtacatcgttttggatttgcggatgaggttttgcaacctttaattgagaattatcggcaaggggtgaaatcgaatatggggcaagaaaagagtatgcctaatgatgtgtttctccagatttatcaagataactttttgttaggcaggcctgtatgtacggttgatgagaaacttgcggccactttgtcggtgcttgactcgttgtctgctaaaagttttcaggattggatcactggttggtacaaaggacgggataattgggtgttcctcatgcaaggtaatgattctacttatcttttcccggatgcacaagagattgaaaagatgattcgggattcccattcggttgatatggaaaaggagcgtcctcaagaacagatggtagaggaaaatgctgaattaattgatttcgaaattaagccggggaggatcgtgaaagagaggaagataaaagcgttggatgcggaagagtggatattggataacggggctagagtcttttataaatatacggatggtgataaaggcatgtttaatatgttggcgggaagtcccggtggacgttctgttctgaaagccgaggatttgccatccgctgatgcgttatcagccttgtttttgcaaggtggtttgtataagtatgatatgcgtacgttaggattttttctgaaggatcatacggttgatgtgaatctgtctttagaggaacgttcggagagtattagtgttgtcggggcatcggttgatgcagaacttgcttttcagttgttctacctgacagtggagcgtcctcgttttgatcgtgtgctttataatcgttttgtggcaattaatcggatgaatcgggcgaatttaaaggcgacgctaaacgatacgattagtgagatgttatcttcgattagaagaatggaatcacctcgtctttggagaaaggatactacttactatgcggcaatgaattataatcgaatgattcaaatctataaggaacgttttcaagatgcttctgattttacattttatttggtgggggatattgaaagagagaaagctcgtgagttgacgattaaatatgtgggagccgtttcttccgtgtttagaaaggagaaggcagtggagcatgtctacgagcgaagagagaatataacgaaagatgttgaagtgaatatgccggatcgcaaatatctagtcagtatagagttttataacaaattgaaaaccaatccgacagaagagttgtgtatgcgtattttgaaaatgtattttcagtatcattttcaagaaaaaattcgaggagatcaaggagctgcatatagcgtccaagtattagggggtacttcttcttcacccgattatcagcaggagcttttcattcgctttgcgact

SEQ ID NO: 304 - DNA, 1863 bp, Unknown
  Unknown gut bacteria
atgggggtggtgtgtggaagttcttttttctttttgcggcaggatgaatttcgtgaacgtttgaattatagatctatttacgaaaaatattcttcttacccgaaagcttatcttgagtctcaggatattgattatgagcaacgagaggatgaaatgtttgtgaatacaaaactcgttgtgcggaattgtacgggggtggaacttgacaaggtgttgctttacttgaatccgagtttggaggtgacttccttgttcataaatggaacgacttccctttatgaacgggaaaagcaagtgattggcgtaccggcgagattgtcccccggggattcgttgctattggaactatcttataaaggtcaaatcgacgagagaatttgttatctgaatgttccggatgcagaaatcgcagatacacgcgagcgtatgtatttggcttgtcgtttggggaaacgttattcgtatttacgaaaagattttactttgttgatcccggaggttttgtggtacccgacgactgttcctccggaaaatccgggttccccgtatgataattctagggattttactcgttactcgttgcgagtacgtaattacgggaaaaataaagttatttcccagggaatgcgaatgaaaaagggggatcaacttgtgtttcggaatgaatccccgttgccgggtctcacgcttaatataggcgattacgttacccggcagttgattgtggatagtgtgacttacgagcttcacgtgtggcgtaaacacgcttcattgttaaaactattgaacgatcggttgttaccttcttctgtacgagagggaacttctgcgaggtcaattatccgtggagctcgtcacgtggctgaaatttctgcggggaataaatatccttataaacgttttcaacttgtggaaacacccttggattttacctcttatttccgtaatgagatgaagtgtagtgggtttgtgcagcctgaagttttgtatttccctgaacgaggattcgggactaaaatattttctagtgaggtagaagttgctgttcatttattattgtttcgagaagaagtatggcgaaataccttttcatggaacaaaattttaggatggaatatgttgtggggaaaatatcgtttggaagatgttgagtgcagtaaaaatccacatttaatttatgcccaatttaataatcaaatttcgggtatagtttctcaaacttatcctttcttgaattctttaatgaatctaataatagaagataacaaccagacgagaatagaggcacgacctgctttgacacccatttgggaacagcaggcgattgattatcttcgttcgcgtagtttgaaagatgctttacacgataattctttggatgtggcagtacttgatgccatttttgtattaaaggaacgggagttggtggatatacttcaaacccaaggggtcgatcaggataagctagtgttttttttgatggatttttttaataagtaccgtttcaaaatggttgattttgaacaattaaacgaggagtttaaagcggtttttcaagtagattggaatatgatattgccttcttggtatatgaacaataaaattccgacatatttgctaaaaattgcaaaaatattgagagtaaaaactgaaaattcaaaagattgccgttatcgtatagaatttgctgtttttaatgatagtgatgtggatggggtggtcaattttagaacatctacttatttaccgggaggttggccggagatgcaacgggctcataaagaaaaaagacgggaatctattattaaataccatgcatttaaaattgaagccggaacaggtaaacgatttgcattcgaggtg

SEQ ID NO: 305 - DNA, 1161 bp, Unknown
  Unknown gut bacteria
atgaaaataaatatgtttgttgtgcttgcaagtttgtttatggcttgcggcacacctaaggacgggtacgtggtaaaaggaagcctgaaaaatgcgggagacgggtatgcggtgatctccgtggccgaccatacgggcgcatcggtgatagcagatacagccgagatgagcgggggaaagtttcgtttcgagggtaagacgcctttcgtggcggcgtgttctttgcgagtggtaccggaagggaaagaagtgttggatatgcttatcgtgttggagaatagtccgatcaagctgcaaggtgattgggcaaatctggaacggaataccgggggaagtttctttatccgggatatgaaagtcacgggcggcaaaaacacggaggtgtgtaatcttctggatgaagtgtatttttccacccggagattgccggagttcaaggattatgaacgattggaaaagtggttcgcttcgctggatgaaaatgcggagttgacggacgaggtgatgcggaaggcggatacgttgcaggagatagaggattgttttcgggagttggtattcggaaaacaactggaaatcatggcggcacatccgtcatcggaagcggcagcgctgtacttgacccccatgatagacgggatgaagttggacgagttcgagcgggtattcgggctgtttgatgaggcagtgaggaatagcgagatgttgaccgacatacgtgaggaattggaaactcgccagcgtctggctccgggacggatagctcccgtgttctcgttggcacagcgtgacgggcagatgctgtcgcttgccgatttacgcggtaaggtggtgttggtggacttttgggcaagctggtgtggtccgtgtcgtgcgtctttcccttggatgagggagttttacaagaagtatcacgacaaaggggtggaaattctcggggtcggcgtggataaggatgtgaaagcatgggaaaaagcattggatgcggaaaaattaccatggttgcatgtacgggatgcgaaagttccgggtggaaagcatatggtaagtgacttgtatgacgtgacgggtattccgcacttcgtgttgatcgaccgtgaggggaagttagttagatgtggctattttgagtacgaactggaggagttggtggataaatta

SEQ ID NO: 306 - DNA, 696 bp, Unknown
  Unknown gut bacteria
atgaaaaatagaatatttgtcatattagcttttgtattcgtgtggatgggatgtgatgaaagagagatccctgtatatgatactggaaagttttatatcgagtttgaaaatgagacggttgattcgacaattttcacgtttatatattatccgcgtaacgaatattatgatttgcccgtagcaatgaaaatagctggagaaactgcaaaacgggatttaacgtataagatttccgtggatgaagaactttctacggtggaggacaaacattattctttgccggaaacaacggtgtttagtaaaggtgtgtatcatgatacttgttacgttcgtttgaacaaaacagccgatttgtctaatcgggcggtgagacttgtacttcgattggaagcgacttcggatatggaggttggtaagttggacaatgcggtggctattattcaaatttccaatacggtagcccgaccatcatggtgggattctaacatagaacaatattatctgggagcttattctcaaaagaagtttgttctctttcttgaagtaacaggggcggatttgacggatgcgaatgatagtgaaaaacgggcttatgctttggaattcaaacaatatttgattgatcatcgcggagagcaagaaacgatagatgaaaacggacagcctatgacggttcctgtgttaggattggaataa

SEQ ID NO: 307 - DNA, 1929 bp, Unknown
  Unknown gut bacteria
atgcaacatagttattcaaagaataagtcctctcaaataaacgggaatttgaatttttcatgggatattacaccttggttaaggtatgaatttgtgggtggtataaataacaatgtcggagtatcagagtcttatgcgggagaacaaacccattacgtggccaagaattatagagggtatgatttcggctcggaaatgtttggttcggataagtataaagcagcgatgttgccatccggaggggaattatataatggaaattcggatgtactggggtggaatgttcagaataagattacttttcagaaaacgttgaaggaagatcatcggatcaacttattgataggtacggaagtgtcgtcaactaaaacagagaataggggacaaaaaatttatggatacgtggcagaaagaggcgagagtgttataagaccgacaccaataaaggagttggtgcctattggtaatgctcctgtaacaggatggggaattttagaggatttgtatgatggagcaggatggagtcgtagcacgttgacggataataaattttccttgtttgccacgttggcttactcttataaaaatagatacgtgttgaatgccagtatacgtaacgatgcttccaatcgcttcgggcaggatcagaataaacgtttcgacccgacttattctttcgggctttcttggaatgttgctcaagaaccttggttgaatagtatttctaatatattgaaccagttcaatatgagagtgtcctatggtattcagggaaatgcggtgaattcaataagtcctgaattaatattgagcatggggaccacgaaactttattatggtgattatatgtcgactatctttcgtattcctaatccccatttgagttgggaacgtacgaagatttggaactttggtttagatgttcaatttattcaatggatcacgatgaacttggaatattacacgagaacgtccaataatattgtgaatcaacgaatagccttagagtatggtagggaaggaacagaggtgaacggtgggcgtattgtgaattccggagtagagtacacgttgaatattacaccaatacgtacgaagaattgggcttggacgatcgggttaaattcatctaaaaattggaataaggcaaaaacccaatcgattagtgaaattacgctgagagattatttgtcgggatcttctgataaggtattgaaagagggatatgcggtatctagtttttggtcatataattttaaaggtatcaatccgaatgacggaagtccggaatataatttactttttgagcaggacgagcagggggattatgtgagaaatgaagataataatcttgttttaagggaaatttccgattacacggatttacttgtttattctggtaaaaccgagccagatttcactggaggtttgacaactcgtttgaggtggaaaggtttgacgttcggggcgaatttttctttgttgttgggagccaagaaaaggttgccgaatccatatcccgcgagcggcaatattccattatctaacgtaaatttgagtaaggatctgaagaaacgttggaaagtgcccggagacgagaaaaatacaaatattccgggagtttatgccggtcgtattcctaatatgattaatcttcaagatggaaaatcgtataacgtgtatgatatgtggggacagtcggacgtgatggttgtaaatgccgattttttgcgttgtcaacaaatgtcgttgacttggaatatgaatgaggaatggtgcgcgaaaataggagtgaaaagtttatcgcttaacgcaattatgaataacgtgtttgtgattgccgataaaaagtttcatggttttgatccggaattgggagatagcgtgcagcccaagacatactcttttggtgtaactgttggtttttaa

SEQ ID NO: 308 - DNA, 1065 bp, Unknown
  Unknown gut bacteria
atggaaggtggagcgatattggccatggatacgattcaagacggcaaatttgaactacacggcgtaacagcttcaccgcagtactgtaatttgataatcagctctaacacctcttcatccgacatgagcaaaatggttaatatttatatgtttctcgataactccgaactgacagtgaacgcagcccatttagacagtctacaatttgtacatcctctcatatcggaaaccgccataccgaaagcccgggtggaaggcggtccgttacagcgagagttttatgagtatcgcgataccttaacgcctttgctgttgacggcctcggaggtaaataatgctttagccatgctgaatatgcaaaacgaccaatacacgacagaggaatacaacaaccgatttgacgaactatatcccaagaaactgacaacggaagcagctatcgatgctgctaaaatggaatttatccgccagcatccacaatctccggtatcgcttttcatcgcagaaggcttgttgaacaccactttcattcgcactgccgaagaaataaaggaactgacgcgcattgccgaacaaatcgaggataccgtgcgtcgtccccgtgtcttaaaaatggctgaaatagcaaagacattgtacaagggagcatcatacaaggatatagaactaaccgacccgacaggcaaaaccgtgaaactatcacagtatatacttcccgaccactacacgctggtagacttctgggcttcgtggtgcggtccctgccgctgggccatccccgacgtgaaacaaatttataaacgctatccccaagatcgactatccgtgatcagcatatcgttcgaccaaaagaaaacagactgggaaacggcaatgaaagaggaagccatgccttggacccaattatggacaggcaatcgcgaccaagttaccgcagctcagcgtgcctacaacatcagtggcattccacgcttgatgctcattgcccctgatggcaaaatcgtttttagcggtaacgatgctaacgcattacgggttgccgtggaagaatgtttagggaaataa

SEQ ID NO: 309 - DNA, 2475 bp, Unknown
  Unknown gut bacteria
atgtggtccggattattaattggaaacctgagggcacaatccgtgatagcagacaatcctaacgtgacgttgcagctgagtaacgtgacattgattgaattttttaataaattgacagaggttacaggaaaaaatttcgtgtacagtgccgatattttggaacagaagggacgggttagtgtgacggcagaaaacgagcggttggacaaggttttggatagatgcttgaaagaaaaaggattagggtacacgtttcaagatgatgttatcttgatttatcttcagaacgagaaggtttccccaggagagaaggtgaagaaacgacttgtacgaggagtcgtaagggatcaacagggtgaccccttggtgggtgcgactgtagttttgaaaaatacccacatgggggtggctactgatgtggatgggcgttttgagatggaaataatgccggagaccgaatatttagtattttcttttatcggtaagaaggaaaaagaggtaagtgtaaaaaagcacaaggaattagaggtggttttagaggatttgatggagaatttggaagatgttgtaattaccgggtatggtaatatcagcaaatcaagttttacgggtaattcggtgagcattaaacgtgaagatttgttgaaagtgtcgaaaagtaacgtgattgcggctttacaaactttcgatccttcttttcggattcaagagaataatcaatggggatcagaccccaacgcaattccggagatgtatatccggggacgttcgggtgtgggaataaaagaattggataaggatcaattgagtaaatcacaattagagaataatcctaatcttccgctttttattatggatggttttgagattagcgcccggaaattgtatgattttgacccgaacaggatagagaatgttactattttgaaagatgccgcggcaacggccatgtacggttcgcgggctgctaatggcgtggtggttatcacgacgattgccccgaagcctaataaaatcatgattacctataatatgacgggaactgttatgatgcctgatcttagtgattacaacttgatgaatgcccgggaaaaattggaagcagaggtggcaagtggtgtgtatcagggatcgaatgctttcggacaggatttgttgaaccgggagtatcatgctaagttgtcaaatgtattgcgtggtgtggacactgattggttgtctcaaccgttacgaacggcttttaatcatcaacacagtctttatttggaaagtggcgcggagaatttgcgtttcggggtcgaattgaattacaataataatgacggtgttatgaaggggtcgtttcgtgatcgggctggtgtaggcctttctgtagattatcgaatcggagattttcaaatccgtaattatttttcttatacatcggtaaaatcgaaagaatcaccttatggaattttttctgattatactaaaaagttaccttatgatgagatgaaagatgaatatggtcaatggttatgggaaacaactacttggcacgacaataccgggaatacgacagttaatccgttgtatgaagctggattgaaaagttttgacaagacggagcaagaggagttcgttgataatttgaatgtgaactggtatgtaacgcctcatttacaattgaaaggacaggttagtgttattaaaaccggttcggaacatgagaagttcgtggatccgaaatccagacataatactcgaccattgtctaatagtaatgtttcttccggggagttacacacgacatcaggagatgaattatcatggaatgctaatgtatttgcagcatataattattttttgaatgagcataatattaatttgaatgtaggttttaatatccgcacttccaacacggagtctttgaatgctttttaccggggatttccttcgggtattttgcattcaccgaattatgcgcaagaaattgttactaaacctactgctaatcagaataaaacccgtttgttcggggtggttggtacgctgaattattcttataggaatatttggttattagatgttgctttccgttcggacggttcgtctgagttcggtagtgatcggaagtttgctcctttttggtctggaggagtgggaatcaattttcacaattttgcttttatgcagcaaacgggatgggtgaatacgtttagactgaaggggtcttacggggtaaccggaaaagtgaattttgcaccttattccgctcaaacaatttatcagatacaaaatgatgagtggtataaaactggttacggggctactttgatggccttgggaaatatgtccttgggatgggagaaaactcgtaagttgaatattggggcggatttggaattatggaaaggggctttacagctttctgcttcgtggtataaggataaaacggtggatttaattaatgatgtaacgattcccgcatcttcc

SEQ ID NO: 310 - DNA, 1281 bp, Unknown
  Unknown gut bacteria
atgaaaaagatattttacatgattgtgttcctaatgctaggaacattgggaaacttatcagctcaaataaccttatttaaaggtacatttgatgaggctctaaaaaaagcacaacaagagaaaaaggatttgttcgtggactttttcgcagaatggtgtggaccgtgcaaaatgatggcaagcgaagtattcacgcaaaaagaagtcggagaatttttcaacaatcgtttcatatgcgtacaagtagacgtggatacacaagaaaacaaagacatcgcaaaaagatacaacgtaacagcgttaccgactatggtgtttatcagtcgggtaggtaaagaattgcgccgagtacagggaagcgttcctgcagaatcgcttattaaagaggcaaaaattgccacgggagaagaattgagtttcgagcaattgtacgaaaaatacaaaaagaagaaaaatgacctcgatgtacaacaacaattgttgatcgaagcccccgcatttatagctacacaacagggatacaatcaacagaaatggggaacccgtattgaaagtcttttcccagaatacctaaaaaacaaaaaaatcgagaacatggcaaacgaagcggactttctagtgctaacgatgtatcaccgtgcggcttcaaaagaagaccctatctttgattacctggcacagaactatcaaaaatttgccaaagaaatcgggaaagacaacgtggctcgctacttggtttctttgaataacacatacattatccaactctgtaaaaaaggagacttaaattacaaaaaacggctggaacgggtaaacggggatttaaaagatgtttactcggaattttctttcgggaatctttcggttcagaatgccctcacgttacttgccgatgccacgtacagcctgcatcgccatgacgagaacaccttcttcaagaaaatggatgcctattttgccgggaaaggcgacaaaacggaattgaacgactatttccaacccttacaagacatcgctgtcgtgtacgagggtaaattgtcggaaaacgcttaccggagatgcatcaactggatcgccaaagccttgacattcgataacgtgggagcgtcaaatcgtacccgcttgttgatgatgatgggggactgcttgaaaaacacaggcgataacgccaaagcaaaacaatcctataaccaagcattcctagcgagcgcacaaatcgagaacaaaatggagatgcaacaactccaacaaggtatccaacaatcgttacaaggcttatga

SEQ ID NO: 311 - DNA, 1539 bp, Unknown
  Unknown gut bacteria
atgaatagaatgataaaatacgggttattggtgaccatgttttttatggcatcatgtggtgatttcttggagcctaaatcccagagtgaatatgttcccaaattagttaaatcattagacgaattgttgctgggagaagtatatatgggaccgggatatagtgatgggcagttttacggggtgttggggttattcgatgacgatgtggctattcggccggattggaaggcgaatgcttctgaggaagagaagataaataaaatccggatggcttacacgtgggctaaaaacatgaaagatgagtttagtggatataatacctacggggaagtgtacaaaaaaattcttggatgtaactctgttttggattatattgatgaggtgcagggatctgaagaggaaaggaatagggtcatggctcaagctttggctttccggggatatttttattttcacttgataaatttgtatggaaaaccttactccgtgggtaaagattcgccgggagtacctttgaagttgacggccgagatggggacaagcggaatgaaaaggaacacggttgaggaagtttatacgcggataatacaagatttattggaagcggaacgtttgtttaagacattgccggaaggagagtggagtttacaaaataaccggatcaatttaccttgtgtgcaattacttatttcccgcgtgtatttgtacatggagaattgggcgcaggcgttggcttacggggaaaaagttattaccgattatggttacgaagtattggatttaaatggagagcctctacccaatgagaaaatgaatcctacttataggagttattatacttgggaaaatccggagattatatttttgtttgggaatcaaggagatgtattggaactgccactaacaagggtttattatagtggagataaaggtttcacaagttatatccctgccgtggcttcagataatttaataagaacttatgatcttacggatttacggcgagatcattatttaatgtgggaagtaatagattatggatatactccaaggtataaaaaggccgtgagtaaatttgaggctgttagtaattacaatatagaggtttcttggaatggtggaaagtggggcgttgcttttaaggtcacagaagcttatttgaatgcggcggagggagctgcaatgctttataaagaaacgggaaatggagaatttcaaatgaaggctcaggctttgcttgataaattacgagtgaaaaggtttagtgccgcggcatttgtgagtacggatattagtgccgcggatgagttgatcgcttttgtccgggatgagcgtcgaagagaattgtgtttcgagaatcatcgttggtttgatttgcgtcgctatggaatggaagagataaaacatgtttggtatgatgcttccggcaatgcttccgagtatgtgttggagaaaaatgatcctggtttcacgcttcagcttccgaatgaagcttttgaatataattctggtttggagcaaaatgaaccgagaaaatga

SEQ ID NO: 312 - DNA, 852 bp, Unknown
  Unknown gut bacteria
gggctgtttcaaatcgggatgataggaggaagattgcgtggatccacggaagttgccgcgattactccgggaagtaacaaggctcaattgattttatctgatggagaggtcgtggatttgcatgcagcggtaagacaattgcccttgtctgttaccgggattattcgaaatgattcgttggaaggtttgaaatactcgggaaatgtcgggatgaaagaagagtataatgtgttgcaaacaccggttgggggtttttatcatttagaattgtccgatggtacccgggtctggttgaatgcttgttcagaattgcgttacccggtaagttttgtgagaaaagaacgtcgggtgatgctgaaaggagaggcttattttcaagtgagccgggattcatcgcgtcctttttatgtgcaaacttcccgtcaaaatattcgtgtgttgggaacttcatttaatgtgcgttcttattctgcaaatcaagagtatacaacgttggagtcggggcgtgttagcattcattgtttggggcaagattgtcttttaagacctggagaacaattgcgtttgtcggatacatctgttgttattgttcctgtacgttcggaaagttatatcggatggaaaaatcaatgttgggtgtatgacaattgtatgttgaaggaggttttcaaggatttggaacgatggtataatgtccagattgaattggaggatgaatctattggtttacgacatttcacggggaatttcagacggtatgataatataaatacagtattagaaatgataggattagttgcacatgtaaaatacgaggtggaaggacgggagatcgtgttttcatggaaatag

SEQ ID NO: 313 - DNA, 2400 bp, Unknown
  Unknown gut bacteria
cggtacgaaagattgttttttttaaatgctttgcgtaatacggttgctccttacaaaaccgcgtccggtgagtggaaaattcctacatcttatgaagaggtctacgctaataaaagcactaacggtcccatgtataactggttttggggaaaaacgggacctcaagatgcagtgatgttacaagatagtttgaaccctttttacaataattcaacgcattggtatcgccaaaattacaggaccgcaggagtgattaacgcaaacttgcaagcatccgggggatcggagaacgtgcgttacatggttggggccggttattatgacgagaaaggaatcgcaatcaatactgattttaagcgttttaacgtattgtcaaatttaactgcccatccggctaaacgtttgcgtatggatacgcagttgggacttacttacagtgatcgtagtaggggaacttctgctggagccgggggaagtaagtttgaaggaattagttctgaggccaaaactacttctactctgttgccgggaggaggagctatcggagatttaatcattcaaaagtataacgaaatttcggagaaaaatcaaagctattctttacgttataatatggcattggattacgaattgatgcgtaatttaaatttgagagtatctgctggaatcgattataatcaacagaatcagaatacctttaaaccacgagctttagatgcctatacacatttttccagttcggaggggacgattacgaaagatttgtcgattttgaatgaaaatttgctgacgtacacgtataattatttggataagcataatttgaagattatgctaggattgtcgttccaaaaagaccagtcctttaataataaagggaaagcgatgaacgggccgaatgataagattcattatgtcggtgccggttggggaggagctaacgggttgaataatacgggtacggcggctgatcctttttatgtgtctgcttttgaatactcttcaggtttttcagaagaacggatgaacagttatttcgggcgtttgacttataattataaagaaaagtatttatttgaagcaacgcttcggcgcgatggttcttctgtgttcggggaagatgtgcgttgggctactttcccttctatagccgtggggtggactttttcggatgaaaagtttatgaagccgttctattggttgagttttggaaaaatacgggcgagctggggtgtttccggtcaaaaattcagtcaacgttatttgtcccagggattattgtctgctaatggaaccacctttcatggggatatagccatgttcccggatataagaggaggagttattaacaagaaattaagttgggaagagactaatcaatatgatttgggatttgacttgagttttctggattatcgattgcggcttgtcatagattattattatcgttacacgaagggacagttgaatcaaatttctttgccgggagatatttattaccatcaattccaatggcagaacgggatggcgatttccaatcaaggtttagagcttgaattggaggcagatattttgagacacacggcagtaaaatggaaaatgaaattcaatgcttcacgaaattggaatcgttttgaaaaaagtgctgacggttttgattttatggaacaggttatcggaaaacctttgcatcagataaaggtttttaaaacagacgggttctataattcattggatgaagttccggtttattatttggctaataaggaggtacaacctctttattccggaattacggcagggatttatcttccggggagtcgtcggcttgttgatttgaacggggacggtaggattaccgaggatgctgatgtttattttgcagagagtcctctacctttagctcacggtggttttattaaccaacttcgctggaaaaattttgacctgaatattttcttcaactattcgctggggcgtcatatcgtgaaagtttacgatgatgtgagcatgacggcaaatgggagcgcaaaacctttgttcgtggatgtcaatgatgtgaaaatttggacggaagcaggttctaaggccgattacccgaaatctcaagtatatgcttatttgatgaatcaaacaagtggacgttatgattgtgatatcgaaagtgttagtttcttgcggttaaagcaactgacgttggggtataatgtcggggaacgggttcttaataaattgaagatttcaggggctagaatatttgttacgggagagaatttgttcctgttgacgaattattccggtttagatccggaactggtaaatcctacccaaggtgtggataatatggggtcttatcccttacctcgtaaatttaccgtgggtttgtctgtaaacttttaa

SEQ ID NO: 314 - DNA, 1389 bp, Unknown
  Unknown gut bacteria
gagagatcttatgtacgtaaatctcatcaagatattttgtctattacaccgacggtaacgacggatgctgatgtggaatatgcttgggaactttggacttcagtccggacagatggaattatttacaagccggatacgattgggcgggagaaaaatttgaactatgaagtgatggaagatcctggtacctattatttggtatttaatgtgaaagataagaaaacaggagtgacaaccgtgtgtcgtagtactttgaatgtagagactcttaattcaaccggttggtatctgctgaaggacgaagaggtggctggagagatgtacacggactatgactttatttatgacgggggacgaattgataattggattgctttttacaataacgggaaaaaattgaaaggtgaagcagtaaaaagtatattttcttctaattattcagatcaactttccggtggagggtataattacataaacgttttgatgccggtgtccaaagaggaagtttctgttttggaagttagtaatggcatagtccgtttgccttttgaatctttgttctttgaatctcttgaagtgaaaaattttcaagatatttctattcaaaatgatggaacgaatgttggtttggtaaatgatcatcggttttataatatgtctacacagaatgcaacctctttttatgcttcatacggagattacaacgtggctagtggtattatgagaggattaaacggaccaactttttttgatagtgtaacagaatcatttgtttacgtgtcttacggtaatataaccagatttccagcagtttcaggtgatttgacttgtaataacatgaatgccgatttattatggagtagtgttattaattttagagtacagggtacaaagtggtatgcttacgctttgatgaagaaacatacaggggaaaatccttatatgttgataaaatttagactaaattggggtgatacagaaaatcgtgtagagcaagttaacattcttccgtctacgcttaatttggtaaccgcagagaggtgggctgtaaatgcaaactatggaattatttatttcgtgaaagatcaaaaattgtatagatatagtatagatagtggtaatgaagaggtaattttagatattcccgcaggagaagaggtaacttgtatgcagcatattatttatcctaatctgatgtctgctgatgattatggctctgtcatagatcaatttgcagtagcaacttatgctaacggaaaatacaaagtgtggttgtatgaatttgatgccggaaatttgaaaccgttaagtaaacccacgtttgaagggaacgggcgtgttgcttgtataaattatgtttccggtaatagttctaatttcttattctaa

SEQ ID NO: 315 - DNA, 2733 bp, Unknown
  Unknown gut bacteria
caggcccgggagacggagagaaagccggtaaccgtgaaggggaaagtggttgatgagaagaaacagcctttacccggggttacagttttgttaaagggtacgactttgggagtaacaaccgggggagagggtgatttttcgattgtgattactgatacgaccaaggctgaactcgtattttcatttatcggtatggtgtctcaaacaatcccttataaaagtattcctaaaggggagtggacgatcgttttgaaggatgatgtacaggagatggatgaagttgttgttacgggtatttattctcgtaaaaaggagagttttaccggatcatcaacaacctatacggcaaaggaattgaaaactatcgggaaccagaatgtgcttcagagtttgaaaacgatggatccctcgttcgcgatcgtggagaacaatcagttcggatccgatccgaaccgtctgccggatattaacgtgaggggtaaaaccagcgtgatcggtttgacacaggagtacgaggtcgatccgaatcagcccttgtttattttggatgggttcgagacaactttaaagacgatcagtgatttgagtatggatcgcgtgcaaagtattacggtgctgaaagatgcggcagccacggcaatttatggttcgaaagcggcgaatggtgttgtggtggtggagacgaaggctcccgctcccggaacattaaggttaacgtataacggaaatttaaatctttcttttgctgatttatcggattataatttgatgaattctaaggaaaaattggaatttgaacgtttggccgggtattacggagatttggatgctaacggggaaatcgtgtcggaatatgaccagcgtttgtattaccagcgtttggccgaggtgaaacgaggggtggatacctactggatgagtgaaccgttacggttcgcaacttctcatagtcacaaccttttcgccgaaggaggggatgacaggatgcgttacggcttgggattcagttataacaagacgcaaggtgtgatgaaaggatctgatcgggatgtgattaatggcaacgtgcaattgttgtatcgctacaagtcattgtcattcaagaattacttgaatttggattactcgatgtcttcacgagagaaggtcacgttttcaaaattttcacaggcgaatccgtaccacaggaaaaagaatgaggatggtgtggtggagcaagtgttagagatttacactgattcggatgcaaattctcctacttatcttcaggaattaaagaattataatcctctatatgatatgactttaggctcttccgatgaaacctcctcttttggttttacgaataatttcgagatcgattggcaggtgtttgatggtttgcgggcgaaaggtcgttttagtatttcaaagtcaacggaccggggggaagtttttaaatctcccaatgcttccgattatgctgaaaccgcttcaacggaacgcgggtcttaccgggagacaagagacgagaatttgagttatgatggagatcttaacgtgacctacgctaaattgtttaacgaggtacacatggtaaatgccgtgggtggaattcgtttggcttcgagcaaatcacaatccagtggttacgagtctatcgggtttatcgatgaccgttattcaaatccttctttttcttcagggtatcctacgggaggtaagccatcgtatttcacgagcgagaagcgttcggcgagttattatctgaatgccggttacgcttatgatgatcgttatctgctggacgtgaatcttcgttcggatggttcctccgtgttcggcttgtctcaacaattcaccacaacttgggctatcgggttggcgtggaacgtgcacaaggaagacttttttcagaatcagaactggctgaattttttgaaattgcgtttttctatcggtaatcccggaaatcaaaactttgatgcttatatttccatgaacgtgtacaagtacgcaactggttacccgaatcctttcggggtaagtgctattgtttcgacttggggaaataatgatttggattggcagaaaacaatcgaccagaattatggtattgatttggcttttttgaataatcggttgaaagttacggttgattatttctataaaaataccgatcctctattggtttatgttcagacgccgacctctaccggaacctctactgttccgatgaacctgggtaagcaagtttctcagggattgacagcaacattgaattatatgatcctgcagcgagagaatatgagttggaattttaattttaatgctcgtcatattacttacgagtaccggaatatcgggaccgccttggataagtttaatcaggagaacaggagttctaatttggtgagatattacgatgggggaagtccttccgatttgtgggccgtgcgttccgcgggaattgatccggcttccgggcgagagatattcattaaaaaagacgggacgcagacattcgagcatgattacgcggacgaggttgttgtcgggaattcggatccgaaggtggaaggggtaatcggtacttctttctattacaagggattttctgcttctgtcaatttgcggtatcgcttgggaggacaaatatttatgtcgactttatacgacaaggtggagaatatttcggaaaatgccttgcaatataatcaagataaacgggcattgtatgatcgttggcaaaaa

SEQ ID NO: 316 - DNA, 1131 bp, Unknown
  Unknown gut bacteria
atgaaaaagctctgttttttattactgttcggcgctgctgcttgtacgcagcagcctaccgatcattttatcctgcggggtacagtccccggagtcatggacagcacgaaagttaccctacgaacagtcacccgctgggacaaagatttagctagcgcttacgtcattgacgggaagtttgagttgcgcgggcaactggatgctcccaccctatgcaaacttagcctaaacaacgcacgttcttacgagcttgatttttttgtcgaaaacggcaaacttacctttaccacaccacatatcgacagtctgccacaagcgtacggactttacgacatccgaaaagaaaagaactatcgggtggaaggttccaccacgcaagatgcgtactaccgctaccaacaacaaacccttccgttgcgttacggcatacaggaactccgcaagcaggcaaatcaaatcccggactataacagtcgattggaagccatgaatgcggaactagacaaaacaagccgggcatttatccgtaacaatgacaatctggctaccaatctctacattgccgggacattgaagaaacccgcattcacctacgatcaaacttatcttgacgaactggaacaactctttgcttcctgtcaagatacctgtgccgcactgaaagatttccgcagttatctccgtgatgcctcccgactagtccaaggctccccgctacaagaggctgaagtggtcaatgacaaaggagaaagtgtatcactgatcgcccagttgaacagagaagggtacacgctgatcgatttttgggcatcgtggtgtatcccctgccgagtgagcataatattcctacgcgaaatatacaaaactcacggggattcaattcgcttcatcagcatatccctcgatcaacaagaggccgactggcaaaaagccctgaaagaagaaaaactgccatgggcacaattccgtagcctacccgaacagactaaaacattcacagaacaatataatctcattggaattccagccttctttatcatcgatagcgaaggacgaatcgtcttttcaggcagttccatgaacgaactgacggaacaactacctaaaatgattacaaactctacacactga

SEQ ID NO: 317 - DNA, 1434 bp, Unknown
  Unknown gut bacteria
atgagaaaagtgattattatattgacagctctggcgggaagcttattcttcaatagctgtaatagttggctggatgtaaagccttatgattctatggcagaagaacagctttattctacggagaatgggattcagcgggctttgaacggtttgtacctgagtcttgcatcgaatgacttgtatgcagagaatttaggagggggtgctattgatgtattgggacagcggtataaattgtccagcgaacattcttattatgatttaagcgaatataaatacacgaatgacggtccgaaagagacttttgaggcaatttggaaggctgcttacaagttgatcgcagattgtaatgaatttttggaacaagttcctaggcatcaggatttattgtcccagggaaattataaaatgatgatgggggaggctctggctatccgaacattattgcattttgatatgtttcggattttcggacccgtgtacacggaagcgaataagcaagaagcttctatcccttattatagtatggtgacagatgttacacaacctatcctgtcaacggaagaactagttgaacatttatttacggatattgattcggcaatcgtgttgttgtcaaaagatgtgattttagcggacggggttgttaaaggtgaaggattttgggattatcgtaatttacgtttgaattactatgccgtatgggcattgaaggcacgtatgtgttggtatttgggggatgcgtatgctgatgaggcttaccggattgcaactgctttgttggaggggaaagatcctaaaacaaatgaggtaaataattttaatacggtttttgaaccggtttctcaaaatgtggcggtgaccgatcgagttttctttagtgaagagttgtttgccttgcataatatgaagcgtactacggtttataaagagttatttagttctgatttggaagataataatatattgttgtctacagaggattatatgaataagctttttgatgaacccaacgattatcgttggcattcttgggaggtcgctaccgggcgtcaaacttccggattgatggtatttgtcaaatatgtagaacagacggaaaatagaaatgatccttacttgtatgaaatccaatccatgttgcggttgagtgaactctatttgattgctgcggcaacagctcccgatgatgcaacagttactgcttggcttgaaaaattgcgaatgatgagaggttatcagtctggaatggtaggttcggatgctcagaaagtattgcggcaagaatgggaaaaagaattttatggtgaaggacagtattattattttttgaaacgcaacggtaagacttctgtttctggaccgaatggatctaagaaaccgaattatgttattccattgcctgagagtgaaacaaataatagacgcgattaa

SEQ ID NO: 318 - DNA, 1920 bp, Unknown
  Unknown gut bacteria
atggaagaatacaacagtctgttcaaaaatatgcccattatatatataaaagaagaattgatatataacaaggaaggacgagtaatagactttatattcaaggaagtcaaccccacttttgaaaaatatattactgcaaaaagcaatattctaggaaagaaatacagcgaaacaagcggacaacacaccagatgtatagatctttacaattcattgcagaacaaaaaggaactatcctttcaatactattgggaagctaaacatatttacctaacggttatcattacctgttcccccaaaaaaggcttcttagatgttttctgcgtggacaacacggaactggcacaagttcaacaaatattacgctcaaccaaccacaagttatcgacggcactcgatgtcgccaatatcactccatggaaatgggatttggaaaaacatacgattctatgtgatgtaaaccgtcccattgaaatcagtggcaataactcccctgccgaagaacaacaattatccgttccggattcatcctatttttccaatatttgcaaacaagatattgatcgggtaagaaatgcttaccaaagtttgatagaggggaaagttccgagaataaaagaagagttccgggttatttccaacaaaggctattccgtccattacgaatgggtggaagttcaagccaccatcgatgaatacaaccaagcgggaaaagcgaaaacgctagtcggttcttctttgattatcactcaaagaaaagccatggaaaatgacttgataaaagccaaagagaaagccgaagagtcaaacaaattgaaatccgccttcctagcaaacatgagccacgaaattcgaactcccctgaacgccattgtcggtttctctggtattctggcatcgatgaactcggatattgatgaagaaaaacaggaatacatacaaatcatcgaaaacaacaacaacctactcctccaattaatcaacgatattctagacctttcaaaaatagaagcaggcgtactggaattctcgtacaacaacattaatgtcgacgaattgttcatggacatagaagagtccactaaaatgaggaaccaaaacaaaaacgtctgtattctatacaaacggactttaccgtcatgttacatcagtaccgataaaaaccgcttgactcaagtcatcacgaacatgattaacaatgcgatgaaattcacgcaatgcggcagcatcgagttcggctacaaccttcaaaacgaagattcattatatttctacgtgagtgacacgggatgcggtatccccgaaagtcaagtaaaccgtgtttttgaacgttttgttaaactcaacaattttgcacaaggtacaggcctggggttacccatttgccaaaccatcatcacaagcatggggggcaaaatcggagtaaaatcaaaagaaggtgaaggaagtacattttggtttactcttccctatcatcaagcagatcaagcaggagataatatcgccaaagcacccgaaacccctcgtctcgtggacaaaaaagataaactcgtcatcttaatagccgaggacaatgaaagcaattacaagttatttgaaaccatactgaaaaaaaattacacattaattcatgcctgggatggagaggaagccgtacaattattcaaacaacacaacccacaccttgtattaatggatataaatatgccgaagatggacgggtatgaagctactcaaaaaatacgggaaatatcccccgatgtacccgttatggcaataacagcctttgcttatgccgaagatgaacaacacattctgaatagtgggttcaacgcttacacgtccaaaccgattcaggcagaacaattacaaaaacaaatcgggaatttgctaaaaaaacattttttattcctgtactaa

SEQ ID NO: 319 - DNA, 1854 bp, Unknown
  Unknown gut bacteria
gatggtatcgtgatgcaggatcccgttgatgtaccggcatcagacttgaatgatcctgattacattaatcgtatcggtaacgccattgccggaatcaacccgcaagacatcgagcgtattgacgtgctgaaagatgccgccgcaaccgctctttacggtactcgtgccgccaacggggttatcgtggtaaccaccaaaaaaggacgcatcggacgccccattgttaattacaatttaactaccacctttcgtcaacgcccttcttataacgaccgggccattaacgtgatgaattccagagaacgtatgcaattttcccgtgaattggtcgcacaacactatccatttccggatgacataaacatggtaggttacgaggggctattaaatcaattatataatcacgaactaaccgatgaacaattcgagaaagaagtggaacgtctcagtgttatcaacacggattggttcgatttattaactaaaaactctgtatcacattctcacacgatcagtatttccggaggttcgtctgaagcaacttattatgcctcgatcggctacactcgtgataatgatgtggtttgggacagtaacaacgaacgctacacagccacgatgaaaatgaacacgaacctcacttcctggttcaacgcttcgctgaacgtgaacgggaatgtctctacccgtcagtattatcaacaggaattatctccgatggattatgcctataaaacaactcgggcgttacccgcatatgacgagaatggggaatatttttattttcagaaaagaaaatggggaaccattagtccggaatattatcgatacaatattctcaatgaattggaaaacagttcctacaaccagcgtggttctgcgttatctgttacggcaaacttacaattcagtctgataaactggctgaaagctaatgttattgcatcttaccagacatcgaacacgattcaggagagctggtggggagagcaaaccaactatgccgcaaaattacgaggcacagaatatggtgtattgccagcacccagaaccgaaggggaaccggattatctaggtaatcctacctataccgggggaacaagcctcttgccctatggaggagaactttcacacaatcaatcggacaatcactcttataccgtccgtttacagttggacgggaactactctttcggcaaatcagatcagcataacattaacggttccatcggttttgaaatgagttctacccgcaaccgaggttattcacgcaccgaacgtggttattacaaagaccggggcatgagttttgtgaatgacattgatcatgagaaatttcccgattatgcccagtgggtgctacaaaatcccgctcgaatgactgatggtaaaagtaataccatatcaagctatgcttccatatcttatagttactacaactattttaccgtgaataccaatgctcgcgtggatggctccaacgcattcggagaccaaagtaacgacaaactgttgcctatctggtcggcttctgccaactggaacatttcggagttacccggcttgaaagagacaaagtggttggactttctccgtctgaaagcatcgtttggttaccaaggaaatatgctcagtgatcaaagtccggtgatgattatctccaaagaaccgctaaattctcatttcggagagaacgtggcttccgtttcacgctatcccaacccgaacttgaaatgggaaaccaccacttcttacaatttaggcatggagcttggactgtttcaaagaaaagtgatgatagaggctgaatactggtggaaacacaccgaggatgcctttatggataaatccatc

SEQ ID NO: 320 - DNA, 1128 bp, Unknown
  Unknown gut bacteria
atgaaatacattttatttatcgcattcattctatccgtcgtcagttgtgcaaaacacgacggatataccctcacgggactcgtccccgaagcatgggaagggaaacctgtttttttggtactggatgatacgaatcaacctcattttattgacagcacgaaaatatcgggaggtaaattcaaattccaaggtaaattcgaggttccgcgttattgcacgattaacatttaccttgatcccaatgaccgacagacccgtagtaaaattataaacttctcgttatttatcgacagcacagcggtagaagccacttgcaactattccggcaaacaccccgtgttccaaatctccggaagcggcacacaaactgaataccagaactacctgagcgagatacaacccatggaagatgaccggagtaaaacgttccacgcttacggggaagcctactacagtacgaaggatttagcgaaagcgattgaccttgccaaacttgtcacggaaaaaagactcgcgatcagagaggctaaaatgaaatacctgaaagcacaccccgaatccgccatcagcgttaagatagcgcaagaactctccgacagaaattccgacctttccctgaaagaaattgaaggattgttcactagcctatcgcccgaaatgcaaaattcggaaatggggcaggctcttcgggcaacaattcaaggtagacaggtatttataggaagtccctttatagaccgggaactctcggcaccggacggaagtaaaaagaaaatatcggatttcgtaaaacccggatgtactacattaatcgaattctgggcatcttggtgcaacccctgccgtgtggaaattcctcacatgcgtaacacgtacaataaataccatcccaaagggttaaatatcgtgagtatctccattgacagtgatccgaagaattggcatcaagccatggaagaggaaaaaatgccttggggacagcttattgataataccaaagcaacctttcgagcttataacctgactggagtcccttcttcaatccttgtagacgacaaaggaaagatcattaacgtaaacgcaagaggcggatggctggatgccgccatgcaggaaatctatgattaa

SEQ ID NO: 321 - DNA, 1782 bp, Unknown
  Unknown gut bacteria
atgttagctatcggtataccaaatccgctctatgaagcgacattaggtaattttagccggggagagtcttcgaacttgacgaataacttgagcttttattggtttatcaatgatcatttgcaattacaaagtcaattttctgttacgaagaatgattctgaagacaaagattttacagatccgttgtcaacgaagtacggttcttctgacaatccttttactcggggaagtttgagcgtgtcaagtacgaataatttcaattggaacttgaatgcatttttggcttataacaattcgatcgggaaaaattatttgaatttatcttttggtatcaatgctcaagaatcacaaacaagtaattcttctgctcaatacaaaggattcccgtctgcggctctgcacacggttgggcatgcaaaagaaatcgtgagtaaaccttccggagcagacaataaaacccgattgatgggaatttttcttagtggaaactattcttgggataacatctttttgggggatgtgtctattcggtttgacggttcttctgaatttggttccgaatcacgatgggggtctttctggtctttaggtgccggggtgaacgtgcataattttgaattcatgcaatcgcttccgtggattaaccagtttaagattcgtggaacttacggtgccacaggtaaggtgaattatcctccttatgcggctcgggatatgtataatattttgtttgacgattggtattccacgggtattggggccacgttacagggagtcgggaatgaaaatttggtgtgggaaaaaacaaatacgacgaatcttggtttcgatctcagttttttcaaaagcaagtataaccttactttctcgtggtataatcgtcaaacggtagatatgatcacggatgtgacgattccctcttctgctggatttacatcttataaagataatatgggagaaactcggaatcgcggatatgaaatcagcctgaatgctatgattgtaaatcacaaagattttggggtgaatgtgtttgcgaattttgctcataacgagggaaaattaatgaaaatatccgaatcgttgaaagcgtataatgagcgggtagatgcttatctgactcctacttatgcttggtatcgaccgacggcagaacaatctttgcctttcttgaaatatgaggaaggtggttcgttaacagctatttacggtatgaaatctttaggaataaatcctcaagatggaaatgaattatttgttgatcgttcggggaatgtcgtgggagaatggatggcttctcaacaacaaattataggaaacacggaacctaagggacaaggttcgtttggtattaatatccgttggaaaagattaaccttgtatacgagttttatgtatgaattcggaggacagcaatataattccacgttgttgaataaggtggaatgtgttgatttgtcttcgtccaatgcagataaacgagtattgactcaacgttggcaaaaacctggggacgttacgccgttgaaaaatatcgctgatcggaatcgaacgactcagtctacttcccgtttcgtgcaggataacaatgaattttccatcaattcgctttcgttgtcttatgatttcaacccggaatgggtaaggcgtatcggattggatgttgttcggattcaagcaagtacgaacgacttggcaacattttcatccattaaacaagaacgaggtttggactatccgtttgcccggacgtttaattttggtttaagtgttagtttctaa

SEQ ID NO: 322 - DNA, 1524 bp, Unknown
  Unknown gut bacteria
atgagtatgaaaacgataaactatattttagggtgttgtatagcgatgacattgctatacgcctgtattgatgacgagggaaattacgattactcggaattgaaaaccgtgaatattacgaatgtatatagcaactggtccgtgcctttgggggaggaatatgttataaccccgacaatagattacggggatacggacccgtctgaatttgtttatacatgggtgagtgaaattcaagaggaatggagtgatacgatttcacgtgataaggagttgcgttacacatttaaggaaatagctaggtatatgacgactttcgtggtggagcatgtgcctacgggggcattaacatccaaacaaatagatttaaatacggtatcccgttattccacaggatggaccattttgtcggagcaaaacaacaaatctgtattgagttatatccgggccgagcagtcgggagagaatagtataatctacaatttttttaaggatatttacactacacttcgtggagatgatttgggaacaggacctatccgaatgggaagacatttttccagttcgagtgatgaaatcctagttattcaggagagtggtgcggtagaaattgacggtcaagatttttcgaaagcaattgccactcatgaggaatttgtgggaggggcatatcctgccaatttcgttccaaaacaagctgaatatggagctaggttggaggctattttaggtacagatggaaacgtgtacacgcgtgtaaatccgaatggaagttttcaaatttgtcaatacaatacgcatccagcctttagcaatgcccgaattgagaagatgtattattgtgcttatttaggctatatttatatgtatgatgaattgaatcatcgaatgattgctttgtatgatgaacctcaggcttatacgggtatggtgatttatccgtccatgcatccggatagtacgcacgtggataactttactccggttgatgatatgggagagggaacacaattggtatttattgggtcgtacaatgtggaaggagctacaggacgggattttgtacaaattattaagaaaggaacgaattattatttccaaacttacaaagcctatttgcatagtggttcatcaaacttgtatatttttgacgagaaggaagaattgtttgtgggaaatgattatgtgaatgagaattcaaaatattgtatagacggatcttcatatctttattttacagcagataatgttctctattgttggaaccgaatcaatcaggttgaagtgttttatacgttctcgagcaagattactgatattgaacgttatgctaatggtagtgatcgagaagagattgctgtcgggcttgaaaatggggagttttatattattgatgcttcttacgagtctataagtggtcagaaagagaaagttttgttcaagactgaaggtttggggcgtgttgtggatgtgcaatacaagtacgggaattcttcgaattttaataaagaatcgagattataa

SEQ ID NO: 323 - DNA, 1137 bp, Unknown
  Unknown gut bacteria
atggcgcattggaacgaaatagataatatatccgagaagttactcaagaaaattttattgggagagaataaggcagactccatcccttcacaagaggaccacggacgcttgacagacaaatataaaaattggaatgcacttgccgatcaatccaaaaaagttttaaaatatgacgccaataaggctttccaaaaattacaattccagaaatatcgtcgtcgcaaaataataactggctggagtattgcagcgagtattgtactactgctttctatctccattttcttcattcaggaagcacccgaagtaacacccgtttcgaaaatcgaaccgggttacaagaaagccactctaactttatccgatggaacaagctgggacatccgggaagcagtacaggttatccagacaaaaaacagcgaactcaagatagattcgtcaggattaagcgtacacagcaacacgattgctcctccacaagaagaaacacaataccacacgctgaacgttcccagagggggtgaatataatttaaccctatcggacgggacgcaggtatggttaaattcagaatcagaattgcgatttccctcccaattcgacacgaacaatcgaacggtatattgtaaaggagaagtctatttcaatgttacccggaacccagaatctccttttatcgtgaaattagataaaggtgaagtaacggtactgggcacagaattctgcacaagcgattacaaaagttcggttgtagaagtcaccctggtgacggggaaagttcaattcaaggcagaaaacggggattccgtatccttgaccccttcccaacatcttgtttacaacacgacaaacgacagtatttcagtcaccactgtcgacactcgtgtatatacagcatggaaagataatttattctgcttcgaggatgaaactctggaaaatatcatgcacacgttgtctcgatggtacgatgtagatatatattttgaatcggaagatttaaaaagacgacatttctccggaactattgaaaaatattcaaatataaaatcattcttagaagtttttgaaacaggaacaggtataaaattcgacatttatggacacaagataagcataagacaattaaacaaataa

SEQ ID NO: 324 - DNA, 2655 bp, Unknown
  Unknown gut bacteria
gtgctggttggcgccgatcacgagactctagttgattattcaaccataaaattaatattcaaagttatgaaaaaaaatccacgtagcatgcggattcctccgcatggggtgaaaaaatttttacatcaaatgaaatttacattattatttgtcatgctattctgcttttatgcagaagcttcttcacagaaagtcaccctaaaagtgaagaacatggatctttactcggttctcttacaattaaagaatcaaacgggtgtccgcatattatatgatgcagactacacaaaacaaattaaatgtacagatgccacattttttgaaaaagacattaaagatgtgctatcacaattactgaacaacacgaaactcgtttacaaagaggtcaacggtactttcgttatcagtaaagcatccgaacaagaggataaaacagtaaaactggccggtacggtaaaagatatacaaggaactcccctaccgggtgttaccgttgtgattaaaggaaccacaatcggagtttccactgacgcacaaggtaattttaccttgaacgtgaaggaacaagagaaaataacacttgtattctctttcgtgggaatgaaaaccaaagaagtcgttgccactcctaacaaagcgatgatgatcacccttgaggaggatacccaaaccatcgaggaagttgtgatcacgggttaccaagttgtagacaaacgaaaaaacacaagtgccatcacttcagtaaaagcggcagacatcatgcgccccggtattaccacgattgaccagatgctggaaggtcaaattccggacttgatttccatgaccaactctggagaaatcggtgtagctccgaaattacgtattcgaggtacctctactttgattggaaaccgggaaccgctttgggtaattgacggaattgtacagcaagacccggtaaatatatcccccgaggagttgaacaaccccgactatattaatcgtatcggtaatgctatttccgggttaaacccacaagacatcgaacgtattgatgttctaaaagatgcctcagcaacagccctatacggaacgaaagcagccaatggagtgatcgtgatcacaaccaagcgagggcatatcggggctccgatggtgagctacaatatgacaggtacattcaaattccgcccccgttacagcgaccgacatatcgacgtgatgacctcaaaagagcgagtgcaattttcccgggatttattgaatagtaattataatttctctggcaacgtgagtctggtaggctacgagtatctatatgaacaattgtacgcccgccaaatttcatatcaagagttcgaagagcaagtcgcaaaaatggaatctttgaacacagactggttctctgctctaggtaacgatgttttttcctcacagcacacgataagcctaacgggaggatcggatatgattcgctattacgcatctatcggttatacagacgataacgatgtggtgaaatcgaatcggaacgaccgttacacggcaaaattaaatttggatattcatttctccgagaaattctcgacttcattgggcatcgacggtagcaaaagttcgcagaagtattaccaaagtgaattggctcccatcgattacgcctataacacaagccgcacaattcctctctacaacgaggacggaacattacactattaccaaaaaccccaagctggcagatactacaacttcaatatcctaaacgaattggcaaacagcgggtgcgagcaagaaggttcaagcctggcgtttcaagccaatttactatacaaaccactagcttggttgagggtaaacggaattttagcttattcggtttccaacacggagatcgactcgtactggggtgctgaaacacaccatgtagcaagtatgcgccgtggggagttcggaggagagattgacgcagaagaaagcgaattacccgccgggggagaattaaaacaacagagttcacgcaacgaatcggtaaccgctcgtttgcaattggatgccaacaaatatttcgggttagccgaggaacacaacatcaatgcctcgttaggtttcgaggccagctccacaaaatacgtgggcacagagatcacgaaccggggatattatcccgatcggggattacagttcgctacattcgaacagggagtatacccggtcttcgacgcttggctgttggcaaatcgtcctgtattaacagataatctaacaaacttaatagcggtttacgccagtatctcctattcttatcgcaactggatcacgctgaacgcaaatgcccgttatgacggatcgaaccgattcggttcgcagagtaatgataagttgctgcccgtgtggtcagcctccttgtcatacaatccgctggaacaattccaagcaacaggattctttgattttctccagctgaaattctcttacggttaccaagggaatatgctggaaggacagtctccggaaatgattatcaaaaagttgccgttggatgattattaccatgagctggtgtcggaggtttctatttacccgaacccggatttacaatgggagcgtaccagttcgttgaatgcgggaatcgagttctctatcctagatcgtcgcttaatggtaagctcggat

SEQ ID NO: 325 - DNA, 1311 bp, Unknown
  Unknown gut bacteria
atgaaaaaaatatatactattattgtcttgctgggagctatagtattaggttcgtgcagtgattttctggatgagacgacggataagtcgggtagtgcctacatataccatatggatcagctctatgggctgaccggaagtaccgatctttatttgttttctaatgtcagtgatggggaagggatttctggtacagcctatttgacggaagctcttccgttatcggatgcggtggaactgacaccggagttttacgtgtacggattgttggcaggagagccgactacctatgacacgtattgttggaaaggagaatcgttgacagcatcgatgaatatgatgtggacttggacaccggtttgggaacgaatttatcgttttaatacggtgttggagtatctggacaaggtgattcagacgacagaagccatccgtaatcaagtggaaggtgaagcccgtttcggtagggcgtactatcactttatgttgttgacgcagtattgcttgtggggggacgataagccgggtatcggttaccgggacaataccacgacgggagaggttcccggacgggaaacggtagcttacacgctggaacacatctatgaggatttgagactggcggaagaagcgttgattaaagcgggacgcacgacgtttgaccggacacataattttcgtccgactgtgccgacgctgcaagcgtttcgggcgcgggttgccctgtatcggggggattatgagttggcattgtcgaatgcaacggaagcgttgaaagcacatagtacgttagtggattttaaggatgatcccgactatgaactggaaccgtggtggttcattaatgtgttggatgaagagggggaggttgtggatgtcattgaaatcagttcgatgtttgcattggacgacatggatacagaggcggtagcgaagtacgaggagttgtatttgcccaatatatcttgggaagggatggggggtacttgtccgatttcagagtctttttataagctttgggaccaggagaatgatgctcgctggatacatttttacagttcttgcacgcctcttctgatggcctccgggagtcttgtcgagacagatacgaatacttatgaagactatatcagtcatgaaaaatggcaacgattgaaaccttggaatttatacagttattcgcgtttcgccggtaattcgcttgttggtatgacgacagcggagatgtatttgatcaaggcggagtgcgaggctcggagcggagagactggaatggcggcagagacattgaaaacgttgcgtcgcacccgt

SEQ ID NO: 326 - DNA, 729 bp, Faecalibacterium prausnitzii
atgattttatcccagcgccaacttgaagaaattgcagcctcaacaacgaaggacttcaaccggttctttttcggggatgaggcggacaagcccgaccgatcagctttgccaacacccattgatcagtttgcaaagaactatctcggtcttcgcgtatcattcgcccgtctctcgccggacggaagcatctgcggtgtcactgcctatgccgacactgagtacaagatcacggaacttggtattacgcgcacactggctttgaagcgtaatcaggtcatcttggacgagagcttcattcgatccggcaacgtgcagcggctctgcgccaagcgcagatttacccttgcccacgagtgcgcccatcagattctcttccaactggaatcggaagaggtaaaggcttcctgcgaaatgaaatattccgcacggacagcctatacgccgcgagagctgaaaacccgcgaggactggaacgagtggcaagcaaatgtcttgggcgcggcgatcctgcttcctcaaaaagaggttgacctggcaatgcgtcggtttgcagaaacgccgctgatcaattacgaggggaggtattcgtatggtgatcacttaacgctgcgccttttctgccggttgttcggtgtctccaagacaacggcgtctatccgccttcgtcagctcggctacatggtagatcgtccattcagtgagtatgttgacccattggaggtgtggtaa

SEQ ID NO: 327 - DNA, 1890 bp, Faecalibacterium prausnitzii
atggctgaaaacaaaaatgcacagcaagtccgcgaaatcacggacaagctggaacagggcatcaaggagctttttgaatccgagcggttcaaggaatatctccgcacgatgtccaagttctacaactattccttcaacaacacgctgctcattgcgatgcagaagccggaggcaacctatgttgccggttatacctcgtggcagcgcaactttgaccgtcaggtcatgaagggcgaaaagggcatcaagattcttgcacccgcgccgtacaaggcgcaggaagagcgtgagaagattgatcctttgacgcagaagccggtgatcggcgcagatgggaaggctgtcacggaaacggttgaggtcctgcgtcctgcctttaaggtggtgagtgtctttgatgtttcccagacggacggcaaggagcttccggacatcatcgtcgatgagctgaaaggcaccgtcgaaaactacgaggcgttcttcgatgcgctcaagcaggaatctcccgtccctatttcctttgaggacattccgggcggtgcaaagggattcttctcgccggttgaaagccgcattgccattcaggagggcatgagcgaagtccagacggtcaaaaccgccattcacgagatcgcccacgcaaagctccacgctgtcaagccggatgagaaagccgcgccagaagataagaaggatcggcacaccaaggaggttgaagcggaaagcgttgcctacaccgtctgccaacggtacggcattgaaacctcggactactccttcggttacatcgccggttggtcatccggcaaggaaaccaaggaactgaaaagctctctggacaccatccgcaagacggcggctgagatgatcgagggcattgacgccaagctcaaggtgctgctggcagagaaagcacagtccgcagagatggaagtcgaagctcccgtaaaggaagctgtttcggaggaaaagccggaagtccccatttaccgcgagacggcgaattacgcctatgaagccggtgagatggacgcatatcgtgcttctctcgccgcaaacgcggaatgccgccgtgcgattgaagcggcaatcagttctaactacggagacaaccggctggatgcggatgctgccgtgaaaagcgtccttgagcagttctctccggagcgcgtccggtatgtcctcgcaaacaccattcagcagaaagactttgacgggcgcattccgcagcctctcaaggagtgggcgaagagcgttgatgtctgcccggagaatgcctcccgcttccttgtggataaacccaatcccggactgacggcacttttcgtggatgcgttccgtcagcagaccgaaccccagaaggaagtcacttctgagaaaacagaggaaagagacccggaggttgttgcatgggagaacgatgagattgcctctattgaggtaaaaaccgtggaggtcaagtctccctttgcgcccttgccggaggaagcagcaaaagcaccgaagacacaccgcctgactgccgaagaaaaggagatcaaagccgccgtcatggacacgctcaaggggcagatcgcctataacaacgacggtatgcgggcgtcctatcgcgcctctaaccactccttcaatctgctggcacggaacggcgtcaggatcgagggcaacacggtcacgcagaacggtgagccgctgttcaaaattcatcgccgtcatgcggcgcggaaaacacagggctgttaccgtgagctgatgccgacgctggaatacgtcaagcaggagcagaagcaggaaaagccctctatccgcgatcagctcaggactgccgcaaaacagcagccggagaagaagtctcaggtcaaatccaaaacgcacgacatggagttgtga

SEQ ID NO: 328 - DNA, 1203 bp, Faecalibacterium prausnitzii
atgcccgtattagatggtgattttgaagccttcgtcacgaaccttggcaagtacaacgagggtatgctggtcggtgagtgggtgaagctgcccaccaccgaggaagagatgcagaaggtctttgagcgcattgggatcggcaagcaggatgagttcggtcagccctatgaagagtggtttatcaccgactacgaatgtccgatctacggcgttcagaagatgcttggcgagtacgagagccttgataagctcaactaccttgccgctttgattgacgagctttccctgagcgatcaggaaaagctcgttgccattatggaggctggctgcgatgaggtcagcgacatcgacgatctcatcaacctgacgttcaatctggactgctacgacatcatgcccggtatcaacgacgaatccgatctcggctattattacgcacacgaagccggtatctactccgaaaaggatctcggtcctctggcaaattacatcgactatgaacgctatgggcgcgacattgcgatggatgagcagggacgcttcaccgatgagggctatgtccgtgtcgcaagcgaacgctgggacaggcagtttaacggggagcttgatgatattcccgatgaataccggattaccggctcaggggaagccgccgagcgtgacagcaccatcgccgttctcgtcgttgagccgggaaaggagccttatgtgaaggagattgactccggtctggagtccttgcagcatgaggtcggcggctatatcgaggcaatttatccctacgaagaccctgttgccttagtctgtaatgaggaaggcaagctggaaggtctgcccctgaaccgcgctctgcgtgatgaggatggtgacatctacgacgttgttgccggaacattcatggtagttggcttgacggatgacagcttcggctctctgaccgtagagcagatgcagaagttctctgaccacttcaaggtgccggagcagtttgttaagttgggcgataagattgtggcaatccccatgatctcgaaggagcagcagaagcaggaaagcatcgagcagaaggactttgagatgaatgccgacacctccggtctgacggttgccggtcacatcgggacgtggcacaccattgaccagcacgaagtcagcggtcacagcttttacctgatggagcatgacacctacggcgatgaagct

SEQ ID NO: 329 - DNA, 1176 bp, Faecalibacterium prausnitzii
ggggagcttgatgatattcccgacgaataccggagcaccggctcaggggaagccgtcgagcgtgacaacactattgccgttctcatcgttgagccgggaaagaagccttatgtgaaggagattgactccggtctggagtccttgcagcatgaggtcggcggctatatcgaggcaatttatccctacgaagacccggttgccttagtctgcaacgaggaaggcaagctggaaggtttgcctctgaaccgcgctctgcgtgatgaggacggtgacatctacgacgttgttgccggaacattcatggtagttggcttgacggatgacagcttcggttctctgaccgtagagcagatgcagaagttctctgaccacttcaaagtgccggagcagtttgttaagttgggcgataagattgttgcgatccccatgatctcgaaggagcagcagaagcaggagagcgttgagcagaaggactttgagatgaacgccgatacctccggtctggcggttgccggtcacatcgggacgtggcacaccattgaccaacacgaagtcggcggtcacagcttttatctgatggagcatgacacctacggcgatgaggcggcttgcatcatcgtcgatgagcgcggtaagctcgtccttgatgatgtctacaacggctttgacgatgacacgctccgccttctcgaccttgaggtcaaggaagtgccggaaatgcccgatcccgcgctctccgttcaggatatgaaggactacggctacgcatgggctggcgttcttcccgccggtcaggaggcggctgagacggctttggagaagggctgcgaggtttaccgtctttattccgataacaccgagggcttgtgcgtagatgccaaagagattgccgatcatgcggcaaagggcggaatgctcggtatcagcaaggaaagctggatggcggctcttgagaaggaaaactacctcaaggcggcggagatgtcgatggaggatgactacggcatgattgatgggatcatcaacaacggtccgaaggaggacaagaccgcagaggtcaaagcccccgaaagggtcgaaaagtcctccatcatggacaggctcaagtccgcaaaggctgaaaagcagaaggaatgctgccctccaaaaaagcacaaaggagagattgagctgtga

SEQ ID NO: 330 - DNA, 498 bp, Faecalibacterium prausnitzii
accgcaatgcaggatgaagtcaacaccaaagttgttgcaatcatgatcaagggcggcaaaatctcagccgaggtgctgaaaaaggcactggacaagttcgtgcaggagattgagaaggcacagaagcagatgcagcagcccaaaacctatcgcggcaagcagtccatcaagcatctgatgagccagaacgccgccatctccaacatcgaagtgacggacggcaacatcaagtcctttgagcggactgccagcaaatacggtctggactttgcgctcaagaaggacgtttccgtagagccgcccagctatcttgtcttcttcaagggtcgggacgttgatgtcatgaccgccgccttcaaggagttctccgccaaaaccgtcaagcagaaggaacagccgtccatccggcacaagctggatcaggagaaagctcagagcaaggcgcagcacaaggagaaggtcaaggtcaaaaccaaggatcggggtgtggagctgtga

SEQ ID NO: 331 - DNA, 399 bp, Faecalibacterium prausnitzii
gaaaggaggaaacagtcaatggcatttgttccggtcccgaaggatcttaaccgcgtcaaaacgaaggtcatgttcaacctgaccaagcggcagctcatttgtttttccatcgctgcggcggtcggcgtcccgatcttctttctggcgaaggtgcatctcgacttgtctacggcggcaatgctgatggtggtcatcatgctcccgttcatcttcttcgcgctttacgagaaggacggtcagcccgccgaaaagtatctgtaccacatcgtacagtccatgttcatccgggacaaggtgcgtccctaccgcacaaacaatctctacgctgagattcagcagaaaatcaaagaacaggaggaattgcagcttgaacaacagcacagcaaaggcaaagcctaa

SEQ ID NO: 332 - DNA, 2016 bp, Faecalibacterium prausnitzii
atgaccgtcaagaacggcgtcgtttatggcgatgccctttccgctcaggaaaagaagcggatcgtcatgcagaagaaaaaggacaggaaggcaaagaaagtccgcaagtccgcccagcagaccattccctatgtggagatgtgccgcgacggtatctgcaaggtgaacagccgcctctacacgaagtccatcgcctttgaggacattaactaccagcttgcgcagaacgaggacaaaactgccatctttgagaactggtgcgactttctgaactacttcgacagctcgattttcgtccagctctccttcatcaatcagaaggcaagtctcaatgagttccgcaagcgcatcaacattccggcacaggaggacgccttcaacgacatccgctccgagtattccggaatgctgcaaagccagctcaccaagggcaacaacggactggtcaagaagaagtacatcaccttcggcattgaggcagactccctccgcacggcaaagccaaagctcgaacgcattgaaaccgacattctcaacaacttcaaaaccctcggtgtgagaaccgagccgctgtccggctatgaacggctgaaagtgcttcatgatgtgtttaacatggacaccaatgagccgttccgcttttcctttgacatggtagcccggacgggactcagtacgaaggatttcatcgcgcccacttcctttgacttccgtgaaggcaagtgcttcaagatgggcagaaccatcggcgcgatgagcttcctgcaaatcctcgcgccggaactcaatgaccgtatgcttgccgacttccttgagatggacagcaacatcacggtcaattttcatatccggacgattgaccaggcaaaggcaatcaagagcatcaagatgaagatcaccgacctcgacaagatgaagatcgaagagcagaaaaaggcggtccgctccggctacgatatggacatcatcccgtccgatcttgccaccttcggcggtgaggcaaagcgtctgttgcaggatctccagacccgcaatgagagactgttccttgtgaccatcctcatcatgaatacggcaaccaaccgccagaagctcgaaaacgcggtgttccagaccgccgccattgcccaaaagtataactgtgcgctcaagcgtcttgacttccagcaggaggaagggctgatgtcctctttgcctatcggcgtcaatcaggtggaaatcgaacgaggactgaccacttccagcacagcggttttcgtgccgttcaccacgcaggagctttttcagggcggcgaagctctctactacgggctgaatgcgctgtccaacaacatgatcatggttgaccgcaagcagctcaaaaaccccaacggactgatcttgggtacacccggttccggtaaatccttctccgccaaacgcgaaatgacgaacgccttcctcatcacggaggatgacatcatcgtctgcgaccccgaagccgagtattttccccttgtgcagaagctcggtggtcaggtcatccgcatctcaccggtcagcacggattacatcaatccgctggacatcaacacgaactactccgaagaggaaaacccgctgacgctgaaatccgacttcatcctctctatgtgtgagctgattgtcggcggcaaggacggcttgcagccggttgagaagaccatcattgaccgcagtgtccgcatggtctatcaggattttcttgcagaccccaaaccggagaaaatgccgatcctcgaagacctctacaacattctgagaaatcagaaggagccggaggcacagcgcatcgcaactgcccttgaaatctacgttcacggctctctgaacgtcttcaatcacagaacgaatgtggatgtcaacaaccgcttcgtctgctatgacatccgggaactcggcaagcagctcaagaaactcggtatgctgattgtgcaggatcaggtgtggaacagagtcaccattaaccgcgcccagcacaaggcaacgcgctactac

SEQ ID NO: 333 - DNA, 870 bp, Faecalibacterium prausnitzii
ttgggcagcattttagaaaagatcgaacaagctctcaaggatatgctgatcggatggatcgagagcaacctgaccaatatgttcaccgatgtcaacgagaaggtaggaacgattgccgccgaagttgggcaaacaccgtccggctggaacggcggcgtgtaccagatgatccggggactatctgaaaacgtgatagtccccatcgctggtatcatcatcaccttcgttttgtgctacgagctgatttctatgatcaccgagaaaaacaaccttcacgacatggacacatggatgttcttcaagtggtttttcaaggcggctgtggcgatctatctcgtaacatacacgtttgacatcgtgatggcagtattcgacatcgggcagaacgtggtttccggtgcagcaggagtaatccacggcaaccccagcattgaccttgacgcgacgattgcgcagatgcgtaccggcatggagaacatgggcgtcggagaactgctcggactgtcgatagaaacgcttctgatcagcctgtgccttaaaatcatggcgatcctcattacggtcattctctacgggcgcatgattgagatttactgcaccgtgagcattgcgcctattcccatcgcaaccatgagcaaccgcgaatggggcagcatcggcacgaactatctgaaaggcttgttcgctctggcatttcagggctttctcatcatggtctgcgtcggcatctatgcggtgctgatcaacggcatgatcatcgcagacaacattcattcggctctgttctctgtggcagcgtacacggttattctgtgcttctcgctgttcaagaccggaagcctcgcaaaatccattttccatgcgcactaa

SEQ ID NO: 334 - DNA, 2070 bp, Faecalibacterium prausnitzii
ttgatcttagtcattgctgaaaagcccagtgttgcccagtccatcgcaaaggtgttgggcgcgacgtcccgcaaggacggctacatggagggcggcaattacatcgtttcgtggtgtttcggtcatctggtggagctggcagacgccagctcctacgatgagcggtatgccaagtggcggtatgacgatctgcccattgttccggaaagctggatgtttgaggtcacgaaggacaaagcacaacagttcaaggtgctgtcctctcttatgaaggacaagcgcgtcaccgagctggtctgcgcaaccgatgcagggcgcgagggtgagctgatcttccggctggtctacaacaaagctggatgcaccaagcccttcaagcgtctgtggatcagctcgttggaggactccgccatccgcgaaggcttcaatcatctccgagacggcaaggaatatgaccgtctctatgaagcagcactcagccgctcgaaggcggactggatcgtcggcatcaacggcacccgccttttcaccacgctctatcacaagaagctggtagttgggcgtgtccagacgccgactcttgcaatgctggtagagcgcgacggaaaaatctccacgttccagaaggagaagtatttcaacgtccatgtcggcaagggcgatctgactgccgatctggaaaaggtcaaaaccgaagaggaagcaaagaagattgcggcggcttgcgagaaaaagcaagccgtcgtttcttctctcaagcaggaaacgaagacggtcaatcccccaaagctctatgatctgaccaccttgcagcgcgaggcaaaccgatactacggcttcactgcccagcagacgctcgatctcgtacaaacactctacgaaaagaagctcctgacttatccgcgcacggacagtcagttcatcacgggcgatatggaggacactgcccgtcaggtcatttctatcgtctgccgccagcttccgcttttctccggcgtttcggttactccggacattgcccgcgtaaccgacaacagcaaggtcacggatcaccatgccattctcccgaccgttcagctcgaaaagcaggatgtttccgcgctccctcagtcggaacagaaaatcctcaatcttgtcgggatgcgccttctgtgtgcgaccggtgagaagcacacctacgcagaaacgcagatcacgctctcctgcgagggctacgagttcaaagccaagggcaagaccgtcgctcaaaacggctggaaagccgttgaagagctgttcaaggcatctctcaaggcgaaggaaaaggatgatcccatgaagtccctgcccgaagtccatgagggcgatatgctggaaggtgtgtctgccagtgtcaccgaacacttcacaacgcctccgaagcagtacacggaagataccctcctgtctgcaatggagactgccggaaacgatcagtttgacgatgacaccgagaagaaaggtctcggcactcccgcgactcgcgccggtatcattgaaaagctggtgaagtccggctttgcagagcgtaaaggcaaatccctcattcccacaaaggacggctgcaaccttgtctgcgtcctgccggaacagatcacctctcccgcaatgacggcggaatgggaaaacacgctcatggagattgagcgcggcaaggcagatgcagacgccttcctcagcggcattgtccagatgaccggcgatctcgtaaaagcctatccgtttctctccgatgccgaagcccagcgtttcggcacgggcaaggaggaaatcggcaaatgtccccgctgcggctctccggtctatgtcggcaagggcaacttctactgctcgaacaaggactgctccttctgcctgtgggaagacaacaagttcttttccagcaagaaaaagaagctgaccaagaggattgcaaaggagctgctggacaagggctggtgccgagtgaccgggctttacacgccgaagaagcctcagctctacgatgcggtgattcgtctggatgacagcggcggcaaatacgtcagcttcaagatggagttcgaccgatga

SEQ ID NO: 335 - DNA, 2205 bp, Faecalibacterium prausnitzii
atgtccaatgaaccggaacttaaagcccgcgacaaggtagtcgtgcggatgacgcgggagggcgcggtcgaggaaaacctgacggctggcaccgaacagcgtgtgtcaaagaggctggaagatgcggagctggtgaagcccggtgagacagtcgagccttccgaagctctttctgcggaggaacagaaaaaggtgcagatgcgccgtcagcagcgtcagtttcagacggaacacgccgaagataacgacacacagccgccctcggaaacgtccgtcacagaagagaaaagggcagaaaatccaccccagaatgtacctgaaccgctgccctcggaaacgccgttcaagcatccaactttagagcagcacggcgtttcttctcataccggcacggtgattgctgaaacggttgtcacacacaagctgcgcaagacctcggcagtggaggcagtggatgcggatgccgttctctcccaagcggcggagacttcctccgcaaagccggtctcggacgatgcagtcccgcccacgaagcggatgcagaagctcgaaaggaagtccgagaaggcgcatgagcgtctggacgctgcccgtgagaacctgcccacgcacaaggttctcaagaaagagcgtgtcttcgatgaagagaccggcaagggcaaaacccgccttcattttgaggatgagctgaaaaagccaaagtgcaaaggcaagctgcaatttgagacggataaaaccgtccgcaaggtcggtgacactctcgcctccggcattcacggcaaaatccatgaggtcgagcaggaaaactcggcggttgaggcggcgcataaaacagagatcgccgctgagactgccgctcgtcatttcagtcatcatcgggaaagcagcgtcaacaagccttatgagaaggtctccaagctggaacacaaggcggatgctgctgatgcgaagctccaatatgaaaaaaatcagcaggagcatcctgagatgaagaagcagaacatgaacaagcactaccagaagcagagcatcaagaaggaatatgccgctgctcgaaatgccggttctcagaccgccgggactgcaacaaagagcaccggcaagaagctcggtgagaaggcgtccgacaagatcaaggagttctttgagaagaacaagaaggtcttcatctggatcggcgtcggaattgcccttctcgttttgctcggtgccggaatcagctcgtgttcgatgctcacctctaccggctcgtcggttatcgcttcctcttatctcagcgaggatgacgcgatgctgggcgcggaggcgcagtattgccggatggagcaagagctgcaacgctatctcgacacctacgaaagcactcatgactatgacgaatatcacttcgatctggatgatattgagcatgacccctatgtgctgatctccattctctcggctctccatgagggcgagttcacgctggatgaggtgcagggtacgcttcaaatgctgtttgagaagcagtacatcctcaccgaagaggtcatcgtcgaaaccagataccgcacggagaccgacacatggacggacgcagacggcaacacgcacacggaaacctatcgcgtcccgtatgactactacatctgcaacgtgaagctcgaaaacttcaatctctcccatgtcccggtctacatcatgtctcaggaacagctttccatgtacgcaacgtatatgtcggtgctgggcaaccgtgaagatctgtttggtgactctccctatgtggacaagtacatcacaaatccgcccgctgactacgatgtcaacccggaatacctgaacgacgagaagtttgcagcgctgattaccgaggcggaaaagtatctcggctatccgtatgtgtggggcggctccaatcccgacacgtccttcgactgctccggctttgtcagctatgttctcacgaacagcggtcttgtgaacaccggacggcttggcgcacaggggctttacaatgtctgtgcgccggtctcaaaggcgaatgcacagcccggtgatcttatctttttcgtcgggacgtatgacacccccggcgtgtctcacgtcggcatctacgtcggtgatggggtcatgatccactgcggcgaccccattcagtacacatccatcaactcttcctattggcagcagcatttctacgccttcggaagacccgcctattaa

SEQ ID NO: 336 - DNA, 1029 bp, Faecalibacterium prausnitzii
atgcccattgaaatgttgtcgggtttcacagccaacatttcaatggaaacacaaatccaacagaacaggaggtacaccaccatacaacttgacatcattcataccggcgattgccttgaaatcctgaaaaccctgcccgatgacagcgttcattgctgtgtgacgtcccctccgtattacgcgctccgcgattacggtatggaggctcagatcggcagagagacaacgccgaaggaatatatctcgcgcctgacggaagtgtttaccgaagtcaggcgcgttttgcgtccggatggaacgctctggctgaacatttcggacacctacgctgggaaaggcaatcagggtgattttattgacccgaagaaccccaacggcagaaacggtcaggctgtggctctcaacaacaaggttgagggctgcaagccgaaggacatgatcggtattccgtggatgctggcgtttgccctccgtgataccggctggtatctgcgcaacgacatcatctggatgaaggataaccccatgccggagagcgtgaaagaccgctgcgcccgctgctatgagcatattttcctgttctccaagtccaaaaagtatttcttcgactacaaggcaatctccgagccgattgcccccgcaacggcagaacgcctcaagcgcggcatgaagggcggcaacaaatacggcaagcccgttcccggtcagcctcagccgcagtccatcaaccgcccccgtgagcatggcgagatcaaggacgcagacatcaatccgctccgcaataagcgcgatgtctggaagatcaacaccgtccccttcaagggcggtcattatgccgcctaccctccgaagctggttgaaacctgtcttctcgccggttgtcccgaaggcggcattgtgcttgacccctttatggggagcggcacaaccggcatggttgccgcgcagatggggtgtcatttcgtcggcatcgagctgaactctgaatacaccgagcttgcctacaagcggattggaggtgaaatctga

SEQ ID NO: 337 - DNA, 261 bp, Faecalibacterium prausnitzii
atgccgcttcaaattgtcagaaatgacatcacaaaaatgaaggtggacgccatcgtcaacgctgccaacgagtcgctgctgggtggcggcggtgtggacggctgcattcatcgtgccgcaggacaggaactgctggcagaatgtgaaacgctccacggctgcaagaccgggagcgcaaaaatcacgaagggctacaagctgccctgcaaatatgtcattcacgcagtcggtccgcgctggtatgacggacggcatggggag

SEQ ID NO: 338 - DNA, 225 bp, Faecalibacterium prausnitzii
atgaagagagcatctattcgggttcaggaaccgacgccggagctgatcgaaaaaatccgcagggcaagagttgccatttcccagcagaagccccgatacctgaaatgtccctattgtcagcataatgccattgctgtctacgaggacacgaggggtcatgtagaatccaagtgcaagaaatgcgggcggatcacagtctttgatgtgctgaacatgagaagactg

SEQ ID NO: 339 - DNA, 555 bp, Faecalibacterium prausnitzii
caacatgaaaggggtgaaggtcccgtgataattcgctccgaggaaatatacaaaaaggcgaacagcattgtcaaaagctgtggaacaagagataccttgaagattgcccgtgagctgggcattcatctccattttcttgacaatctgaacgatctgctcggaatgtacacctaccgccataaagagcggcatattcttctgaactccaacatggagtatctgatcatgcaaatggtttgcggtcacgagatcgggcatgatacctttcaccgtgatcttgccaaaggaaacgaaccgctcccggagttcgtgctgttcgatatgcgcacaaaacacgaatatgaggcgaatgcgtttgcctcacacctgatcattgacgatgatgagctgattgacctgatgaagcaggactacgatgtggtgcagctctcggctgcaatgggaacaaacatcaacctgatgctgatcaagctcaacgagctgaaccgcatgggctggcagctcaacttgccttatgtaccgcactctgacttcctgaaaaatgtcagaccggag

SEQ ID NO: 340 - DNA, 240 bp, Faecalibacterium prausnitzii
aaggaaaggatatggaactctgatatgaaaaactttaccgtggaagaaatcaacctgatgtgttgcttcaatacgtccagccggaagcggctgatcgacgatatgaagcgcgtcactctgaacgacatggacggcgaaatcgcagagctgatgtataagaccatccggaagctcgaatccatgagcgacgcggagtttgaggaactgtatatcatgccggacggcatggtagatgactga

SEQ ID NO: 341 - DNA, 1608 bp, Faecalibacterium prausnitzii
atgagcaaggaatacaacatcggcatctacatccgcctctcaatggctgatgaagataccggctatggcagcaaggcggaaagtgacagcatcggcaaccagcgtatgctcatcaatcgctttctcgacaatcatccggagttgtctcactgtcagcgatctgagtttgcggatgacggttataccggcacgaactttcaccgtcctcagttcacgcagatgatggagaaggtcaagcgcggggagattaacctgatctgcgtcaaagacttttcccgcttttctcgtgactacattgaaacgggaaactatctggaatgcacctttccgttcatgggcgtccgctttatttccatcaacgacggctatgacagcgacgattacaaaggcacaacgggcggtctggaagtggttatgcgcagcatcatctatgcggcatacagcaaagacctctccgtaaagaccacatcggcaaaaatccagatgatgaagcaaggcaagtatgtcggtggctacgctccatacggctacgtcctgcatccaaccattcggaacaaacttgccgtagacccggaggcggctgatgtgatccgtcgtattttccgcgaggcgctggaaggcagcaacacctctcagatcgcccgcagcctgaatgatgacggcatcccgacaccggggcaatacttcaagagcaagcatcccgacaagaagaagttcagtaacatgagcgagaaaatcagttgggaaaccgtgatggtctataacatcctcaaaaaccttgtttacaccggaacgctggtcagccgcaaaatgaagtcctgtggtgtcggctcaaaaaagcgtgttgtcaatgagccgatcatcgtagaaggaacccatgaagctattatcagcaaggaagactttgagcttgctcagaaggtcattcgaggcggaggacggaatcccacgcgcaagcagcatgactatccgctcaagggactcgtccgctgcggaaactgtaaacgtgctatgacgcgccggaagaacaaggctggcattcggtacttccagtgcatccactcggtcaacaacggaaacacagactgtccggttggcaggagctttccggaaatggatattgagaaggttgtcttccatgccattgctcagtttctcgctttggcacagaaggaagcagtccaaaaccgagaagtcggtgatcttcggaaatctgccatcaaggaatgcgctgataaaatccggattcttcaaaagcagaacgagcagcacaaggcgtccaagctgaggctctacgaaaagtacgcagccggaagtatcacgaaggaagcgtacattcagcaaaaggcggcaacggacacgaaaattgctgaaaacgatgaagcaatccagtgcagtcacaaacggatgaaggagcttgactccgagacctcctgttcggatgaaaagctggatgctgtctgcgatcagtacgctgactgcaaagctctgacctatgagctgacccacgcattcatttctgcggtctacatttacgatttcgacaacatagaaatcgtctggaagttcaaggacttcctcaatacatcagaaggagaagccaaatga

SEQ ID NO: 342 - DNA, 1857 bp, Faecalibacterium prausnitzii
atgccaggcaaggtttaccgcacggcgatctactgccgtctgtcccgtgaggatggagacaaagtagaaagcaactccatcgccagccagagagccatctgcgaggactatatcgcaagacatgaggatttggagcttgtctgtgagccgtttgtggatgacggttacagcggcgtttccttcaatcgtcctcagttcaaaaagatggaagaggcaatccgcaagggtgcgcttgactgcattgtagtcaaggatctcagccgcttctcaagaaactacatcgacggcggacgttacattgagaagatattcccgcagctcggcatacgcttcatcgcaatcaatgatgcgtatgacagtctgaccggtgatccgcagtccgactcctttgttatcccgttcaaaaacttgattaacgattcttactgcaaggacatctccatgaaaatccgaagcagtctggaagtcaagcagaagagcggtgagttcgtcggttcgttccccccttacggctacatgaaatcgccggagaacaaaaaccagctcatcgtggatgaagcggtcagcgaatatgtgcagatgatcttttccatgtacaaggacggcttctccattgggcgcattgcaaagcgtctgaaccagatgggcgtcctgtccccaatggaatacaagcattccgccggtgtaaagttcgataccgtcttcaaaaccggcgataccgcaaaatggacatacaaagccgtccagcgtattctcaccaacgaggtttatatcggcgttctggcgcaaggcaagcgcggcactcccaactacaaagtccgcgttgtgaaaagcaaggatgaatccgagtgggtcaaggtagaaaatgcgcatgaagctcttgtgtcctacgaggacttcatggcagtcaaggtcatgatgcagcgggatatgcgctgttcgcccgatcaggacgaagcgcatctgttttccggcttcctgttctgcggagactgtcagcagccaatgatccgcaagaccgtcccgtcgaagacgaaaaagtatatctactacgtctgctccaccaataagcacagccggacgtgcagcccgcacagcatcgccgcaaaagaggttgaggaaaaggtcttccgtgccattcatgaccagatcgagcttgtcatcaatctggaacacgcgcttgcgatgatagaacggcttccgtctcagagccgtaaggctttcaattacgaagctcagatcgccaaaatcgaggaagagattgagcggtaccaaaagctcaagctggggctttacgagaacttcatcggcggcgtcattgataagtcggaatactttgagttccgcaacagctacaccaaaatcattgagaacaagcaggacgcgcttctgcgggtcaaaaaagaaatgaagcagacggtgacaaccggcacaaccgaacgaaactgggtaacgcttttcaagcagtatgaaaacgtcgaagagctgaaccgccgtgtgctgatgtcccttgttgaccgcattctgattcacgaaaaccatgcaatcgaaatcgtcttcaaatacagggacgaataccagcagacgcttgaatacgttctcggctatgccgatgaactggatattggcgtagaagggaggggtgagaaaatggcaagaaaaagcagaaagcaaattgcagtcgaagagccggttatcgaatctgtctcttccgaggtcttctcaacagccatctatgcccgtctttccgttgaaaacagcggcaagtctgaaaaggtggatgtcatcgcaaatcagattgagatttgcaagtcgtacattgcagagcgtccctacctgaatctgatagatacctat

SEQ ID NO: 343 - DNA, 243 bp, Faecalibacterium prausnitzii
atgatgggcattgaaacaatgaaaaacgtcagcccgaaaacggttgaccgtagcacactcgttcagagaagcagcatccggcttgatcctgcggcaccgcgagaggacaggctgagggagttcatcaagcagatcagaaatccctactgttatctggacgggaagacagtggtgaagatcagcttcgccgagacggacacgacaatggaagattgtctggaacactatctgagaggtctttga

SEQ ID NO: 344 - DNA, 1137 bp, Faecalibacterium prausnitzii
cagttcatcatggatgatatggaggacactgcccgtcaggtcatttccatcgtctgccgccagcttccgcttttttccggcgtttcaatcactccggacattgcccgcgtaaccgacaacagcaaggtcaacgatcaccacgccattctcccgaccgttcagcttgaaaagcaggatgtttccgcgctgccgcagtcggaacagaaaatcctcaatcttgtcgggatgcgccttctgtgtgcgaccggcgagaagcacacctacgcagaaacgcagatcacgctttcctgcgagggctatgcgttcaaaaccaagggcaaaagcgtcgttcaaaacggatggaaagccatcgaggagctgttcaaggcttccctcaagacgaaggaaaaggacgatcccatgaagtccctgcccgaagtccatgagggcgatatgctggaaggtgtgtctgccagcgtcacggaacacttcacaacgcctccgaagcagtacacggaagacacgctcctgtctgcaatggagactgccggaaacgatcagttcgacgatgacaccgagaagaaaggtcttggaacacccgcgacccgcgacggtatcattgagaagctggtgaaatccggctttgcagagcgtaaaggcaaatccctcattcccacgaaggacggctgcaaccttgtctgtgttctgccggaacagatcacctctcccgcaatgacagcagaatgggaaaacacgctcatggagattgagcgcggcaatgcggatgcagacgccttcctcagcggcattgtccggatgaccggcgacctcgtgaaagcctacccgtttctctccgatgccgaagcccagcgtttcggcacgggcaaggaggaaatcggcaaatgtccccgctgcggctctccggtctacgtcggcaagggcaatttctactgctcgaacaaggaatgctccttctgcctgtgggaagacaacaagttcttttccagcaagaaaaagaagctgaccaagaagattgcaaaggagctcctggacaagggctggtgccgcgtgaccgggctttacacgccgaagaagcctcagctctatgatgcggtgattcgtctggatgacagcggcggcaaatacgtcagcttcaag

SEQ ID NO: 345 - DNA, 351 bp, Faecalibacterium prausnitzii
ccggagggtgctgctgcacacttccggcagaaggaggatatagtgggtgctatcaaagtcttcttgaaggaggttgtgcttccaatcgcgcttgcgttctgcctcgcgtcatttctcaagccgatctatatgcctgacggcgtatgtgactacttccttatgtggatctgcgtcggcttgccattcggcatccggaggatgtgcctctggctcgttcccagcggctacggtatctccggctcagtcggcatcttcgcattgaacttaatcataggcggtcttatcggaggacttgccttcttcatcgggctgctgctcggtgtcattcataccatccgagaaatcatctga

SEQ ID NO: 346 - DNA, 978 bp, Faecalibacterium prausnitzii
gcacaggaggatgatttcaacgacatccgctccgagtattccggtatgctgcaaagccagctcaccaagggcaacaacggactggtcaagaggaagtacatcaccttcggcattgaggcagactccctccgcacggcaaagccgaagctcgaacgcattgaaaccgacatcctcaacaacttcaaaactctcggcgtgaaaaccgagccgctgtccggctacgaacggctgaaagtgcttcatgatgtgttcaatatggacagcaatgagccgttccgcttttccttcgatatggttgcccggacggggctttccagcaaggacttcattgctcccacttcctttgacttccgtgaaggcaagtgcttcaagatgggcaaaaccatcggcgcggtgagcttcctgcaaatcctcgcgccggaactcaatgaccgtatgcttgccgacttccttgagatggacagcaacattacggtcaattttcatatccggacgattgaccaggcgaaggcaatcaagagcatcaagatgaagatcaccgacctcgacaagatgaagatcgaggagcagaaaaaagccgtccgctccggctacgacatggacatcatcccgtccgatctcgctaccttcggcggcgaggcgaagcgtctgttgcaggatctccagacccgcaatgagagactgttcctcgtgaccatcctcatcatgaacacagcaaccaaccgccagaagctcgaaaacgcggtgttccagaccgccgccattgcccaaaagtataactgtgcgctcaagcgtcttgacttccagcaggaagaggggctgatgtcctctctgcctatcggcgtcaatcaggtggagatcgaacgcggactgaccacttccagcacagcggtttttgtgccgttcaccacgcaggagctttttcagggcggcgaagctctctactacgggctgaacgcgctgtccaacaacatgatc

SEQ ID NO: 347 - DNA, 594 bp, Faecalibacterium prausnitzii
atgcgcactaaggaggtcggcagcatgaagaagtacagcatcatctacgccgatcccccttgggcgtatcggacttactccaagaagggacagggacggtcggcggaaagccactacccgacaatgtgcattgaagacatcaaggcacttccggtcggtgagcttgccgctaaggactgcgctctgtttctctggatcacgttcccgtgcctctgtgaagcactcgaagtgctgacggcatggggcttttcttataagaccgtggcttttgtatgggtgaagcaaaaccgaaggaacgacgatctctttaccggcatgggctactggacaagggcgaatgccgaaatctgcatccttgcaacaaagggacatccgaagcgagttgacgccggtgtgcgtcaggtcatcctcagccacatcgaagagcattccaaaaagccggatgaggcgcgggaacgcattgttcggctcatgggagaccttccccgcgtggagctttttgcccgtcagtctcccgaaggctgggacgtttggggcaacgaggtcgaatgcacggctcatcttcctatggaggaaacaccatgctgcggctaa

SEQ ID NO: 348 - DNA, 612 bp, Faecalibacterium prausnitzii
atgatgtacaatgaaaatctgcacgaagaagaacaacatctgatccagcagattgccgagcaaacagagagaggaaaaatcgactgggaactgacggagtataatccgctgtccattctgaatgaggacaagatagacaaaaacccagcagtaatctgtcagtccttctcctttgaagcgatcatcggcggatctcgttacgagcttgatgtcatggagaatattgatgtgccgtccggtatgggagactacaccataaccttgacacgggatgaaaccgaaaattatcttaaaattgaggatgcgctttcctttgactgtgaccgctatgaatgcacaccggaggaagtcgcagagcgatttgcggacagccccattgtccgtctctgcaacgccatcattcctgccacgcttgggcaggaggatttagaagaggtcttcacatgggcaaggtttttcaacgagactggcatttctgcaaagctgatgaatcatccgctgaccaagctctgtgaaaagctgttcgacgaacaccgtctgatggacttccatcgctgcgtcttggatgtggactatcgaaagctgctcctaaatgaactggctcataactaa

SEQ ID NO: 349 - DNA, 825 bp, Faecalibacterium prausnitzii
atggaatacaacgactataaagaagcccttttctatgccgcttccatctttaacgaacgcttgggggcagagttcagcgaggacaatcttgtactgcgctgctttcagacggaaaaccagcaggaagtctttgagcagttctgcaagcagtatttccctgaccggctggaagaccgatatacagaggacggctattttgactttcacgcctctgcattcgtcggcacaggagacggcgcggacggaatccttctgcgcacagacatagcgcgtcatccggcagagttgaagcacattcttctgcatgagctggcgcatatcttctgcacccgcaacgagattggcggagataatttctttgagcgatactgcatggacgataccatcagccgcgaagaggacggaaccattaacgccggttatgcggtctggcgggaactgattgcggagctgattgcatttgagctggatgacaactgcgatgtagttccgcttcgacgcaagaaagacctactcagctattacgaaggagaactcctgaccggcaacggaaaaatgggcgtcagcatgattctctgtgaggcaatgaccagtgctgagggcgaagcgtctatgacatgggacgctgccaaaagcaagtttacgcggttcaagccctttgatgatccactgtacagggacttgatggaactggtttttacacacgttagagaatactttatcgtgatcgaccgcgactttatctatgaaattggagttttgtatctgagcattgccgcacaagcgatgattgtgtccctaaagaacagatttcaggaagaatag

SEQ ID NO: 350 - DNA, 1707 bp, Faecalibacterium prausnitzii
gtggcaagaaaaagcagaaagcaaattgcagtcgaagatccggttatcgaatctgcctcttccgaggtcttcgcaacagccatctatgcccgtctttccgttgaaaacagcggcaagtctgaaaaggtggatgtcatcgcaaatcagatagagatttgcaagtcctacattgcagagcgtccctacctgaatctgatagatacctatgtggacaacggacgaacgggtacggtttttgatagaccggagttcaaccgtctgatgaacgacatccgcaccggcaggatcaagtgccttgtggttcgtgatctcagccggttcgggcgagactacatcgaggcaggaacctatctggaacgggtctttccgcagatcgggcttcggtttatcgccatcaaggaaaactacgacaactttgatacggacagctccggcgaaagcctcatcatccctctgcaaaacatgatcaacaccctctactcgaaggacatctcccgcaaggtttctactgcgctcaaggcgcagatggaaagcggagagttcaagaagcgcaatctcccgtatggctaccgctgggatgaagaacactgcaatatggttttcgatgaggaaaccgcgccgattgtccagaagattttccaatggaagattgaagggctgtcccttccggcgattgcagaccggcttgatgccatgaacgcgcccaatccggagtttcagaagtatcaggtcggcgtccgcacaggcaatgctacggcaaagaagatttggaacaaatcttcactcactaccattctggataatccccattacgtcggagataccgttctcggacggacgctgaacgccatctataagggtgtcaagaatcagcatatcgaccgcgaggaatggattgtttttcccaatactcacgaggcgattatctcccgtgaggacttccagaaggtacgagaaatgcggaacgctgctgcaaggacaagggttgagaagatggagcgcacggaggaaattcgcgctacactggtcaatctctttgaagacagaatcgtctgcgcagactgtggcaggaagctctatttccatcgcaagcgcgttgacaagcgcaaggacggcgcatggtacgccttctatgagtgcagctcatccgtcaagcgcggcaatctctgtacgccacactatacgcggcaggacacactcgaagccgatgtgcttgcggcgatccagcttcaagtcaaggcagctctcaattacgacaagctgcttgccaagctgagaaacagcgaaggtgaacgcagcatccgcgatcaacaaaatgcgctcattacgagcctgaatctgaaactcagcggcgtctccaagaaacgcacccggctctacgaggacttcacggaaggcattctcgatgaagaggaatacgcctttgccaaaaaagcctacgatgagcagtatgccgacctttcccggcggctggatgaagcagttcagcggaaggtcaagtttgccgaagcaatgtccgaggacaataagtggctcacactgatgaaatccgtcagcggtgcagaaaagctctctcaggagttagttgacgagtccgtagagcttgtgaaagtccatgagggcggttcaatcgagctggtcatgaaatacggcgatatttacgctctgaccgttcagagtatcaaggaagtacaggaggcgatgtaa

SEQ ID NO: 351 - DNA, 822 bp, Unknown
  Unknown gut bacteria
gtggtatactataggcaacgcggagaaaccgaatcattcgcggaggagggaagaaacaggatgggaaagatcatatccttcgtaaaccagaagggcggggtagggaagacgacgtcggcggtcaacgttgcggcgtgcctgggcgtactgggatgccgcacgctgctgatcgatctggatccgcaggggaatgcgacgacgggcgtaaagatcgccaagaagaatctgaaatacacggtatgcgacctgctgacgggcaacatcaatgcggcggatgccgtaatacagacagaatacgacaaattatgggtaatgccggcaaacgggcggctggcaaacacggaatttgagctgtacaacggggaggagccggttttcgtcatgcgcaaggcgctggaatcgctcaagaccgtgtttgactacattatagtggactgcccgccctcgctgggaatgctgacggtcaactcgctgacggcgagtgacggcgtggtggtgccgatgcaatgcgaattttacgcgctggaggggttgtcccagctgagcaagaccatccggacggtgcacgacaactacaacagcaccctgaacatcaccggcattctgctgaccatgtacacaaagcgtctgctcctgacgcagcaggtggagcgacagatcgaaaaacactacggcggcaagctgttttccacgcccatcacgcggagcgtcaagctatccgaggcgcccggatacggcgcaccgttctattattacgacaaatccggcaagggaacaaaggaatacctgagcgttgcgaacgagctggcatcgcgcatctga

SEQ ID NO: 352 - DNA, 1026 bp, Unknown
  Unknown gut bacteria
atgatcagcatcgtgattcctgcgtacaatgccgcggcaacagtcggacgctgtcttgactctctgctggcacagacataccgcgactttgaattgattgtcgtggacgacggttcaacggacagtacggcacagattatttccgcctatgcggagcgtgacagccggatccgcttgatcaggcaggagaatgccggagtcagtgcggcacgcaatgtggggcttgacgccgcacgcggcgacctcatcggctttaccgacagcgacgatgccgtatcgccggaatttcttgaagcactgctgtcactgtatgcgcccggcgtcctgccggttgccgatatagagcggagcgacggcgacggttcggtgctggcttcccttccgcccgcgatcacgctggatcccacgcgattgccggaggattacttctgcggcacgctcggacaggggattgccttttcctcctgtaacaagctgttttcggcgacactcctgcgggatgcctgcctccgttttgcggaggagctgactgtcggggaggatatgctgttcgtattccgctacctgcgccgttgccgggaggtacgccttacgcgccgcgccgtgtatcggtacaacattgcggaaaactccgcgatgcagtcccgccgcgactataccggagcgtatgagactgtcctgcgcacactgcgccgaccggacggagactttccgccggttgcggaggaagtgctggcaatgtgggctttggagtcctgcgttttcattctaaccaatcctgcggtttcggaacagccctacgccgcattttccgcatggtgggaaggcttcacgcgcaccggactgtaccgggctgccgcgcaggcgaccgacctgccggacatccgtatcagccgtgcgcgacgcgttctgttccggctgatgcgaggcaatcgcacgcgatccttgcacaccctgctccgtgctttccgaaaaagccggacgttcaaacatacacgccccccgcgcaaaggagatgccccatga

SEQ ID NO: 353 - DNA, 1449 bp, Unknown
  Unknown gut bacteria
atgaaagatatttcccgcaacctgaccatgctctgtgacttttacgagctgaccatggcagggggctacttccgttccggcattggcgaccggatcgcctactttgacctgttctaccgggacaacccggacggcggcggatatgccgtggtcgcaggactggagcagatcgtggactacatccggaacctgcatttcaccgaggaggacatcgcctttctgcgcggcaagggctgcttcgacgagccgttcctcgattacctgcgcagctttcgttttaccggcgatatgtgggcggtgccggagggaaccttcgtattccccggtgaaccgctgattacggttcgcgctcctgcgatacaggcgcagttcattgagacctaccttttgatgatcgtcaaccatgagtcgctgatcgctaccaaggcggcacgcatcacccgcgccgcaaaaggacgggcggtcagtgaattcggttcccgccgtgcgcagggggcggacgccgccattctgggtgcccgcgccgccttcatcggcgggtgccttcccaccgcctgcactctgtcggacgaggtgttcggcgtcccggcgggcggcaccatggcgcattcgtgggtgcagatgttcgacagcgagctggacgccttccgcacctactgcgaaatatacccgcacaatgcgaccctgctcatcgacacctacaacgtgctggactccggtctgccccatgccatcgcggcgttcgacgaagtactgcgcccgcgcggcatcacgtcctgtgcaatccgcatcgactccggcgacatcacctacctgactcagaagatccgcgcccggctggacgaggctggctggcagacctgcaaaattgtggtttccaactccatggatgagtacatcatccgcgagctgatccggcagggtgcctgcatcgacgccttcggcgtgggtgaacggctgatcactgccaagagcgatccggtgttcggcggcgtctacaagctgtgcgccgtggaagcgccggacgggacgattattcccaagatcaagatcagcgaaaacgtttccaagattaccacgccgcacttcaagaaagtctatcgcctgcgcggacgggataccggcaaggcggaggcggatctcatctgcctgcatgacgagaccgtggacgattcccagccgctggaaatattcgacccgcagaacacgtggaagcgcaaggttttgacagactttacggcggaggaactgcttgtgccggtcttccggggcggcgagctggtatacagtctgcccacactgcccgagatccgcgcccgctttgaggcggagtgcgacgggatgtgggaggaggtacgccgcttcaccaacccgcacaactactacgtggatctgtcccagaagctctgggatatcaagcaggtcatgctcaacagccggacacactga

SEQ ID NO: 354 - DNA, 588 bp, Unknown
  Unknown gut bacteria
atgaatcttaaagagctgtacctggagatctaccggagccgcccggaaagcattctgcggttcatgctggtcagtctgtttgtctggacactcctcactctgctgttcgggagcctgcgcgcgacgcgacgcggctggatgtggttcaaccgcatccttgccggatgcgcggtgctgggtatcctgggtataacggtgttttaccggtttatcggcggcggcggcgaggtcggcatcaatctggtgccgttccgcgtgccggaggaggcgtggcgggcggaggaatactaccggatgctgctgatgaatgcattcctcttctttccgctggggctgtcgctgggtaacgcgtggcgcccggagcgccgcatcctgcgccgctttggacttacggttctgtgcggactggcgctgagcctcttctgcgagacgatgcaaggtcttttcatgctgggaacggcggagaccgacgacctgctgatgaatacggcaggcgttgcgctgggcgcggtcagtgcgcttgcggcgggggtactgtcactgccgatccggtggttgcgcaagagcggggagactttccgaaaatga

SEQ ID NO: 355 - DNA, 1023 bp, Unknown
  Unknown gut bacteria
atgtataattattcacgcagaaaggaatatttcatgattgaactgcggaatctgaataagaccttccacacgcaggacggggcgctgacagcactggatgacatcaacctgacggtgcaggacggcgagatattcggcatcatcgggttgtccggcgcaggaaagtccacgctggtgcgatgtatgaacctgctggaacgaccgacgcacggcgaggtgctggtggacgggcaggatctgatgaagctctcccccgccggcttgcgggaggtgcgccgcaacatcggcatgattttccagagctacaacctgctggagcaacgcacggtactgcgcaacgtgctgtacccgctggagctgacgcacgaggacaggcggacggcgcgcacccgcgccatgcagctgctggagctggtgggacttgccgacagggcgtccgcctacccggcacagctgtacggcgggcagaagcagcgggtggcaatcgcgcgggcacttgccaccaacccgcactacctgctgtgcgacgaggcaacctccgcgctggatccgaccacgacggactccattctggcgcttctgcaaaccatcaaccgcacgctgggcgtgaccgttgtggtcatcacgcacgagatggcggtggtggatcgcatctgccaccgggtggcggtgatagacaacagccgcatcgtggaaatgggcgcggtggatgcgatattcgccaacccgcgttccgccattgcgcgggagctgatcctgccgcacgtcaaggtggcggcgaccgtccggggcggggcgcacgtccggctcgccttcaacggggagtctacctacaagccgctggtgtcggcgctgatcctggaaaccggcgtcccggtcagcatcctgtttgcggacacgcgtgacatcggcggcaagacctacgggcagatcctgctggagcttcccggcgaggatcgccttgcccagcgcgtgaccgcgtggctggacgccaatttcccgtcttacagtctggaggtgtga

SEQ ID NO: 356 - DNA, 1200 bp, Unknown
  Unknown gut bacteria
atgatattcacgaccgacaggaccggacggcacgccttcccggtctatcttgataacgccgccaccagctttcccaagcctccctccgtccttcgggcggtggaggcttgcctggaacgttacggtggcaatccaggcagaggctcgcacagacttgcgctgcgcgccgccgaggaggtatatgcctgccgtgtcgcggcggcggatatgttcgggctgagcgatccggcacgtgttattttcacgcaaaataccaccgccgcactcaatcttgccatcaagggcattttgcgacgcggcgagcgggctgtctgctcggacatggaacacaacgctgtctttcgtcccctgttccggctggcaggtgagggaggaatttcctttgacagatttcagaccttttctgctgtcccggagcggacagacgcgatgctcctgtcatcactggagcatgccctttcccgtccaacgcggctcgtcgtgtgcgcgcatgcctccaacatctgccccgcaacgcttccgcttgccgccatcggcaggctgtgccatgcgcacggtgcgctgtttgtggtagatgcggcacagtcagccggcgtactggatatcaacatggaggagatgcagatcgacgcgcttgctgttcccggtcacaaaggattgtacggtcccatgggggtcggtatgctcctgctcggcaagggaatccgaccggacaccttgcttgagggcgggaatggattggactccctgtccgggggcatgggagacgatctgccggagcggtacgagcctggcaccctgcctctgcctgccattgccgggttgcgcgcgggcattgaattcgtgcgcagggtgacaccggaagcaatccgcgaaaaggaaacggcactgggcgtttttctacgggatgcgttaacggaagtgccgggtgtacacgtggcggtgcctcatctggccgggggaaccgtgctgtttcgggcagacggcgtatcctccgaggacatcgccgcccgattggatgctgctggctccggcatctgtgtgcgccccgggtttcattgtgccgcgctggcacaccggacgttgggaactccggagggtggtgctgtccgtgcttctttcggctggttcaacacccgccgcgatgcggagcaactgatccagtcgctgcgcggtggcttacccgggcgaaacgggtaa

SEQ ID NO: 357 - DNA, 789 bp, Unknown
  Unknown gut bacteria
atgaaaaagctgtttgcggttctgcttgcagccctggcggcgctgacgctgttcggttgccagaacacggagaaggatcccacggggagtgattctgcgactgtcggtgagacgactgccgataccgtgaaggtgatgacctacgctgagttcctcgctgccgaggcggatagcaaggtaacggttgaggcgtatgtgcaggcaaagcagtcctggtggaaggacgacaagggcgttggcaaggctaccctgtacacgcaggatcaggatggcgcgtatttcatctacgaactgcctatggaggaggatcagtacaacaagctgaccaccggcaccaagattcgcgttaccggcagcaaggcggtgtgggaaggcgaaatcgaaatcatgaacggtacgctggataaggtgctggagggcaattatgttgctcccgctgtcgatgtgaccgctaagctgggcaccgatgatctggctacttacatgaaccgttttgtttccttcaagggcatgactgtggctgccaagaaggacgccaacggcaacgatgttgcgttcctgtacaagtggaacggcgccggtcaggagggcgatgacctgtacttcgacgtgacgctggacggcaagacctatacctttacggttgagtcctacctgtgcggcaaggacagcgaggtctacaaggcggtcaaggcgctgaaggtcggtgacaagatcgacatggagggcttcctgtactggtacaacggagccaatccgcacatcacatccgtgaaggctgcgaagtaa

SEQ ID NO: 358 - DNA, 513 bp, Unknown
  Unknown gut bacteria
atgaagaagctgattctcatggggcgcgtggcggctggcaagactaccctgacgcaggcactcaagggcgagcagctgcactactgcaagacccagtatatcaattactacgacaccatcattgacacccccggtgagtataccgaggttcatgcgctgggggcggcgcttgccgtctactcctatgaggcggacgtggtcggcatcgtcatcagcgcaaacgagccgttctgcgtttttcctcccggctgtgccgccatggtcaaccgggatgtgatcggcattgtcaccggaatcgacaagccggatgccaacgtgccgcaggcaacccgctggctggagctgtgcgggtgccaccggatattctacatcagctcctacaccggtcaggggctgtcggacatcatggattatctccgggagccgggagacgcgccggcacagctgcagacggcatccccggaggacagtgcatcccgtaatataccgaaaggacaggaacgccatgcgtga

SEQ ID NO: 359 - DNA, 687 bp, Unknown
  Unknown gut bacteria
atgacatacgtagtatccgatctgaacggacatcttgatgtattccgcgacctgctgaagaagatcagcttcagcgaaaagcgggatgtgatgtatgtgctgggggacatcgtggactatggtccgcaacccatggaactggtgcaggatctgagcacccgcatcaacgtctacccgattgcaggcgaccgcgactacactgccgcccgcctgctgacggcatacgagaaaatgctgaaaaccggggagagaccggcggattttgcggaggagatggcagactggatccgcgacggcggtcgcaccactatggaggagtaccgccagctggatgatgacgaccgcgagggcgtgctggattatctgacggatatgccgctgtatgaagaagtgacggttggcgggcgggactacctgctgctgcatcgcggcatatacgattttacgcccaatctggatctggacgaactggcaccggaggacttcttctccgagtcgccggatcctgccgacacgtattttacggacagaatcacggtcgtggggcatatgcccaccgccgagacgcaaaataccgagccgcgcatttaccgcgggaacggcattattttcattaactgcggactggcgcagggcggcagactcggctgcctgcggttggaggacggagcagaattctatgtctga

SEQ ID NO: 360 - DNA, 1821 bp, Unknown
  Unknown gut bacteria
atgatccggcattccacagacagacagttttctctcggcgccggctgcgtccggctggacggtccggcggacagcaagatccgtcttgtgtgcgagggcacgctcaaaaggattgatatgcgggcgttggcggattatttccgcaacaccgccgaccagttcgccaccggcgagttctggggcaagctgatgcgtgccgcgtgcatgctgtgcgcctacaccggcgatgctgacctgcggcgcatcgtggacgattctgccgctgacatgatgggcattcagcgaccggacggatgtctctccaccgttccggatgcactccagccgcagggaacgcacggctccgacctgtgggagcgcaagtatgcactgatggggttgctctcctactatgagctgtccggctctgcggcggcgctggatgcctgcgtccggctggtgcgctacaccaatacgcaggtcggtgacccgccccggacacccatcaccgaaacgggatgggcattctgcggcattgaatcctcctccatcctggagcctgtcatgcgggtataccacgcgaccggggaaccggcggcgctggagctggctacgcacatcgtccggagcggctgctgcgggcgcgagaatatttttgaggcaatccgggcaggaaaatcgccctaccggatcggggacaacgggaatccgcgcgagagtatcgcaaaggcatacgagatgatgtcctgctttgaaggtctgtgcgaattttaccgggcgacgcgtgatgcgcgcgacctggaaacggtcaggctgttctgggacaaggtcagggaggaggagatcacactgctcggctccggcggggcggatgcgcccttcaatctcggtcccggaaccggggaacagtggaatcggacccgtctggagcagaccaaccctgccattgatttgatgatggaaacctgcgtgacggtgtactggatgcggctgtgccaccagctcctgcggctgacgggggaagtccggtacgcggacgccatggaggtcagtctgtataacgccattttcggtgcgctccgcccggacggcgccttctttgaatacttcccgcgcttcaacggagcacggaacccgcgcgtcaattattccttcaacatcaaaggctttgacctgtcctgctgtaccgccaacggtccgaccgggctggcgttggcacctgatatcgcctttgcgggcacgccggacggcgttgccgtcaacctgtacatgacgggatgcgcccgcgttccggttccgggcgggcaggtggtgctgtccatgcagtccgagtttccgcgcgtcgggtacgcccggctgacaatcgaagcaggcgacctgcccgccgggacgccgcttgcgctggatctgcgcgtgcccggctatgcggagcatttcgccgtcctgccgggcggcaatcccacacggatgctgaccggcgtgccgggcacatacctgcgcatagccaataccgtgtccgacggggatgagttcattatttcgctggactactccccgatccggcacgccgccccgcacggcagtgaccgcgcgggtgacggattcgttgcctttacctacggtcccattctgctggcgcgcgacagccgcgattgtgccgatccgcttgcgccggttccggatgccgggatcggggactggcgcgtggagctgccggagcgtccggggcttttgaccgcgcacctgcaggtcggcggcgaaacgctcacgttggtggactatatgtccgccggctccgcttgggacgacggtagttttgcaagctggctgccgatacggtaa

SEQ ID NO: 361 - DNA, 1413 bp, Unknown
  Unknown gut bacteria
ttgtatgatatactatatgtgatcgtgagcccctaccgccgcaacagtcttgtcagaaagagagaggaggcactcatgtcccggtttatcagaaagcacccctatcagaaggttcctgcaatcccgccattcttgcgcaatcacctctggcaaccgctcaaggcattgcttgcctccttagagctgtggcttctgatccccattacgctgcacagcccggacggtgtccgctccatgttcacagtggcgtacggcacctgggcagacggaatgatccttgccgtccagctggtttttctgtatattctgactcacttttttgattcggttgacgacatcaccttcgtggactactgcaagtcgccggttcccctcctgcggcgctactcgtggtggctgtcggtgggactgtgcacggtcggatgcgccccgtcgctggcggtggggatcaatctggttctgcggaacacggcggcggcgaaggcggcggcaccgctctacacgctgtttgtatacctgcttgccgggctggtcgtatgcggcatccggctgttccagatatggctgctgcatcggaagtggagccgtcagcggctggtggaggacggctccacctattggccgagactgcaaacccgcatctttcaggcaatcgtcctgcctctttcgctgttcctgttcgtgcggctgcttctgaagacaggctacctgtacattatcccgaatctcatctgggcagtgctcgtgctggtcaggcgggagcgtgccgcactgccgatcctgctggcggcagtcagcttgtgcctgctgattgtaggcatacgtctgctctgtgcgtggcgcaagcggaaacagctcctcgatcagttggaagagctggcacacagcggacttctgagctatcgcctcgtggggcaccccttcctgtcgcttttgtcgcagcggttcctgttcgggctgttcgtcgtagacacacgcggaaaccgctggcgcgtcggcattgcctcctgccggcacaggtcgcggccggcggtcgcctgtgaggggcatctgctccggttccgacacacgttccggttccggatggcgcccatcatgaacgcctacggagcctatatgcatcagggcgagcagatgggcgtccggtacaccaactaccccgtgcttttccctgtcggcactttcccggatgacctgcccgctccagccaaacagcgccggggcaccggcagacggcagtatgagccgaccgaatccgaaatcatgctgctgtcaccgccgcccgcacagctatatgtcagggcgccgcaaggcttggcagagctggacaacggcagcgaggtatacggctatcaggtctggagcggcggtgcgttcttccgctttctggagcgtatgtacaccggggactga

SEQ ID NO: 362 - DNA, 720 bp, Unknown
  Unknown gut bacteria
atgggcttcggattgttggtggcggggtactttaccctgaccttcctgtcgttcgcggtgggggattacgctttcgctttctatgcagtcggcggcgctgtgagctttatagccgccggaaagctgtacgagtacaagcaccgtttcggtataaccgtggcaacctcgctcgggtggatcgcactgggcgtgtacggtgctgttgcgtttctcggcgaggtgttcctgtgggagctgcctttgccggggatggacgcgaccgttccgaaccttgtgctgttcctccttcagctggtgcatacggcgggactgctgtccgcgacggactgccttgcgcgccaggttggcgcggagaaagtgaagagtgccatcccgtgggacgccgggatactggggacgtgggcggtcggacaggtcatcctgcttctgtttccggcggtcgccgcctttgagggtcagaccgtgaccaaaatcgtcctgctgatccagcttatcggctatctcatggtctgcctgacgttgctgcgtgcctaccgcctgatctgtccggcaggtgaggaggaaaacgcgccgcgcaagcgctcccgctttgctctgatcaaccgcatcaacgacaagttggaggagcgttccaagcgggcattggaggaaagcatggagtaccgccgtcagcgggaggaatcccgccgcacgcgccggaacggaaaaagaaaaaagtag

SEQ ID NO: 363 - DNA, 1839 bp, Unknown
  Unknown gut bacteria
ttggagtataatagtgaactgcttaacgattttgagaatggcaccgcctaccgtgcgcggtgcggaaaggaatcactcatgttttttcggcttctgagaagcgtccgggaatacaagcgtcctgccatcctgacactgatcctgatggtgggcgaggcggtcattgaaacggctctcccttacattaccgccacttacctcataaaccggattcaggaaaagggtgcggagctgagcctgacaggagacattcttcccgtcgggcttctcatggtggggcttgcactggtttcgcttatctgtgcggggctgggcggctttacctgcgcgcgtgcctcctccggctttgccaagaatctgcggcacgacatttttcaaaaggtgcagacctttacgtttgccaacattgacaaattctcctcctcctcgctggtcacgcggatgaccaccgatgtcgccaatgtgcagatggctttcatgatgctgatccgcacggcggtgcgcagtccgctgatgctgattttttcggttgtcatggcgactgtcatgggcggttggctggctttgacatttgctgttgtcattccgttgctggcgctgggattcctgctcatcagccgcaaggcgatgcccgccttccaccgtgtgttccggaagtacgacgccctgaacgaatccattgaggaaaatgtccgcgggatgcgcgtggtcaagggcttctcccgcgaagagtacgagaagaaaaagttcgcgggcgcggcggatgccattaccgaggactttaccaaagcggagcgtatcgtggcgttcaataccccgctgatgaacttctgcatgtacttcaacatggtgttcatcctgctgatcggttcgcttctggcaatcaagcatcccgaaacaggcatcaacatcgggcagatatcggcactcctgaactacgggatggcagtgctgatgtccctgatgatgctctccatgatttacgtcatgctcaccatatccgccgagtccatgcgccgcatcgtggaggtgctggatgaggtgccggatatgaaagcggcggctgacccggttgataaaatcccggacggatcggtcgatttcgagaacgtcagcttcaagtattccgcgtcggctgaagcatatgccctggcggacgtgaacctgcacattccgtccggcgcgacagtcggaattatcggcggcaccggatcctccaagtccacgctggttcagcttattccgcgtctgtatgatgtgagcgaagggacaatccgcgtaggcggcgtggatgtgcgggactacgatctgaacgtcctgcgcgacggcgtagccatggttctgcagaagaacctgctgtttgcgggaaccatccgggaaaacctgcgctggggtaatccggatgcgaccgatgcagagcttgaggaagcgtgccgcctggcgcaggcggatgagtttgtccgagccttcccggacgggtatgacacgcatatcgagcagggcggcaccaacgtgtccggtggtcagaagcaacgactgtgcatcgcgcgggcgttgctccgcaagcccaaaatactcattctggacgactccacctcggctgtggatacccggacggacgccatgatacgggcgggttttgcctcctacattccggcgacgaccaagatcatcattgcccagcggatcgcatcggtcgagaatgccgacatgatccttgtcatggacaacgggcgcgtggtggatatcggcaggcacgccgaactgctggagcgcagtccgatatacagggaagtttacgagcagcagtcgagaggaggtgagcaggatgaagcataa

SEQ ID NO: 364 - DNA, 1986 bp, Unknown
  Unknown gut bacteria
atgacacgcgccgcgcgaagcaacgggcggtcccccgcgccgtactcgctcgccgccaaaacagccgccgttctcctgctgaccgtgacggctttccttaccgccgtctccggcgtgggcatcgggctgtcggctgtgtatggcatttacgacggcgtatcgccggagcagctgctcgccgaccttaccgaaagctaccttgaccgcgccatgcatgacggaacgaactactacctgtccgatccggacggaatggacagctggatacgcgcatggagcggactgtactaccaggtcaaggacggggacggaaacgtgctttcgggcaactatcagggcgagacgggactgtcccatctggaatggagacttacggtgccggattcgaacaaccctgccgtgaccaaagacgttaccctgcacctctgggcagattccggcgccatgcacacatggtatcgcggaatgtaccggagcctgctcttcctgagccgctaccgcgttacgaacgtagcggtgtgccttgccggccttgccgcctccatatgcctcctggtctttctgctgagcgcggcaggcaggcatccgggcgaggacggcgtgcgcgagggtgcgatagatcgcgtcccctttgatctgttcacctttttcgtcggtctgctggaggcggtgatgctgctgctgttgctgaccgcactgccgacggtcggcggcagtatgttctcggcatccgcagtgctgattattgccgtttacatccctgccatgctgctactcatcgggtatgccatgagtctggcggtacgcatcaaagcgggaacggtattccggcatacgcttgtctggatatgcctgcgggctgtcgggcaatcgcttcgctggctgttccgccgcacgcgcgccgccttgcaggcaatcccccctgtccggcgggcgttcgtactcctgctcgtcctgctggcactcaatctgtcggtgggctatgcgctgatggtaggcgggtacgccgggatctttcttctgctggttcttctggagctggtggtgctgggcgcgtgcgcgctccgctacgcgctgggactgcgccgtctgcaggacggtgccgcccatctggcaaagggagagtttgagtaccgcgtgagcaccgccggactgccggatgactgccgggtctcggcagagaacctcaaccgcatcgggcaggggcttgccgacgcggtcgagcagcgcatgaaaagcgagcatttccgcaccgagcttatcaccaacgtgtcccacgatatcaaaaccccgctgacctccatcgtgaactacgtggagcttatccggcaactctcccccacggacgaaaccctgtgtacctacattgatgtgctggacaggcagagcacccggctcaaaaagctgattgatgacctgctggaggcatccaaggcgtcctccggcgtgctgaatgtgattcctgccccgtgtgaggtgggcgtattgctggagcaggtgcagggggagtacgccgaacgtctgcacgcgcacgacctgaatctcatcgtgcagacaccggacaagacgttgaccgtgctggcagacggcaggcacctcgggcgcatttttgacaacctgatgaacaacatcatcaagtatgcccagccgggcacccgcgtgtacctcgacgcccgggcagggctggatcctgccgctccgggcgggaggcgaccggtcgcggtcattaccttccgcaacgtatccgccgagccgctcaacatccccgccgaggaactgctggagcggttcgtccggggggacgcctcccgacacacggaaggctccgggctggggcttgccattgtgcaaagcctgaccgagctgcagggcgggagcctgcagcttgccatcgacggcgacctgttcaaggtgcgccttaccttccccctgtacacgccggcggatgccgcccaggcggcttcatccgggaaggaaaccccgtaa

SEQ ID NO: 365 - DNA, 924 bp, Unknown
  Unknown gut bacteria
atggaaaaccggaaacgggaaaaaggcgcgccttttattgagatcaaggatctttcctatgcctaccccggtgaggagggacgcggacagcaggtactgtcacacatcaatctgacgatccgggaaggcgagtacaccgtgattctcgggcataacggatcgggtaaatccacgcttgccaagctcatcaacctggtcatcgacgattacacgtatgcggaagggcagatactggtcggcgggtgggacgttatggcggacgacctgaccgaggaagacctgctggagctgcgcagacaggttggcatggtgttccagaacccggacaatcagctggtcgcgaccattgtcgaggaggacgttgctttcggaccggagaatctcggcatacccaatccggagttgcgggagcgggtggatgccgcgctggcgacggtcggtatgagcgagtatgcgcaccatgagccgcaccggctgtccggcgggcagaaacagcgcgttgccatcgcgggcattatcgccatgaaaccgcgctgtatgatcttcgatgagtcaaccgccatgctggatccgttggggcggcgcgaagtgctcgccacgatggaaaagctcaaccgtgaggaggggataactgtgctgtccatcacgcactatatggatgaggcggcgcgggcggatcgcgttatcgtgctgtcggacgggcagattctgctggatggcacgccgggcgaggtgtttgcacatgcggacacgttgcggacggcaggattggatgtgccgcaatgtaccgccgccgtgcagtatctgcaggcgcgcggcgtgcgcatccggggggatctgaacacaccggagcagtgcgccgccgcactgctggatgcatggcgtacgcgcggaggcgcaggcaggacacaggcaggaaagtaa

SEQ ID NO: 366 - DNA, 1284 bp, Unknown
  Unknown gut bacteria
atgaagatcatggatattcaaaaactgcttgggcagaatcgggaaatcagcggattccggatcgtatcgaccaagaccgactcctacgagctgttctttgtgcaccggaggctggaaacggttcgtgctaccgacacggacaccgtcagcgtaaccgtttatgtcaatcacgacggcaaggtcggcgattcgaccttctcggtttacggttccatgggtgaagcggaagtcgcggatcgaatcgccgctgccgccgagcgtgcccgtttggtgttcaacgagccttacgagctgccggagggcggcgtgcttgaggcggagttgccctccaacctccgggacgccgagccgcgtgcgcttgctgccgggattgcggacgctgtgttcgccgccgactgcgtggagggtggttccatcaatgcaaccgaaatctttctgtaccgcgacacggtacgggtcgtcaacagtcgcggcgttgacaagacgcaggtcaaataccgcgccatgatcgaagcaatcccgactttcacagagggggaggattccgtcgagctgtacgaagcgtaccgctttaccgattttgacccggctcgcgtcacgtcggagattgccgaaaaaatgcgggaggtttccctgcgtcgccgggcgcaaaagcctgccacgcccatgaccgcccgcgtcgtactacgcagcaaggaaatcggcgagctgatgtccgagctggcaggcgacctgaattatgccaacgtgtacgcgcaaggtaatcttcacaaaaaaggggaagccttacagggggatacgccctccggcgacccactcacgctgacgctttgcgggcaggtacgcggtagcggaaactctgccttctttgacggagacggcgtcgcgctgaccgatacaacggttattcggaacggaatcgtttctgcgtactacggcacgcaccggtttgcctcctacctcggcgaaccggaaaccggcgacctgccctgcctgcggctggcgcccggcagtctgaccgcggacgagctgaacgcagagccatggatcgagtgcgtttccctgtccggattgcaggtcgatctgtacaacgattacatcggcggcgagatacgactggcatatctccaccgggacggcgaatccctcccgctgaccggcatcaccatgagtgccaaactgtctgacgtgctgggtagcctgcgcctgtccgatacgacatctgtcaacgacaactacgaaggtcccgacagaatgctcctgcgcggcatggcaattctgtaa

SEQ ID NO: 367 - DNA, 663 bp, Unknown
  Unknown gut bacteria
gtgcagctgtttccccaaagccccatactgaaaggagtctatcccatgcccgagatcaatccgcaggaactgaaggtggcagagaaccgccgccgcttcaccgagatttaccggagcaccgtcacgcgcgagggcgccgaccggctgttcgcctacctggagagcacggatttcttttccgcgcccgcctcaacccgctaccacggcaactacgagggcggactgtgccagcacagcctgaacgtgtatgactgcctctgcgacattctggcgcgtccccgtatgcaggaggtgtacggcatccgctactccgacgagagcatcgccattgccgcgctcctgcacgacctgtgcaaggtcaacttttacaagaccagcttccgcaacgccaagaacgagcagggcaagtgggagcaggtgccgtactacaccattgaggacaacctgccctacgggcacggggagaaatcggtgtacatcatttccgcctatatgcgcctgacgcgcgacgaggcgttcgccatccgctaccacatgggcttctccgccaacgatgaccccggcaacgtgggcaaggcgctggagatgttcccgctggcgtatgcgctgtgcgccgcggatatggaggcggcgtacttctgcgagggatcgccgaaaaagtaa

SEQ ID NO: 368 - DNA, 1053 bp, Unknown
  Unknown gut bacteria
atggcgatggacggaaccgcaggaacagacggcgggattgccggagttgcggagtggctgacgcagcgggaggaacagctgctcggtccctacgccgcgcgcagcgcggattcacgcggacgggcgcgtccgcaggcaccgtccccgatgaggacggagtatcagcgcgaccgggaccgtatcattcactgtcaggcgttccggcgtcttatgaacaaaacgcaggtgttccttgctccggcaggcgaccattaccgtacccggctgacgcatacgctggaggtttcgcagattgcgcgtaccatggcacgtgccctgcggctcaatgaggatctgaccgaggcggcggcgctggggcacgatctgggacatactcccttcgggcacgcgggcgaggcggcactgcgtgcgtgctacgacagccgctttgcccattacgagcagtcgctgcgcgtggtggacagactggaaaacgacggacgcgggctgaatctgacctttgaagtgcgggatgccattgtcaaccacaccggtgagcacatggcagccacgctggagggcgttctcatcaagtatgcggaccgcatcgcatacatcaaccacgacatagacgatgcctgccgcgccggattacttgaccccggcgatatacccgccgatatctgccgggtgctgggggacagccacagcagccgcatcaataccatggtgtcctcggtcgtgcgggcaagtatggatcgggacagcatttccatggagccggaggtgcaggaggctactatgcagctccgggaattcctgtttgagcaggtctatctcaacccgagggcaaagggacaggaaagcaaggcgcaggagctggtcaagacgctgttcggctactatgcgacgcatcccgaccggatgccggaactgtaccgccgccttgctgccgagggggaaccggtggagcgatgcgtgtgcgatttcatttccggcatgaccgatcggtacgcgattgagacatacgaggagctgtttgttccccgcgtctggagaggactgcacgaatga

SEQ ID NO: 369 - DNA, 1224 bp, Unknown
  Unknown gut bacteria
atgcagaatcgggaggaatctggcatgaaaaaggttagactcggtatcataggcatgggtaacatgggaacaggacatctggatcacacgctgacgggacgtacgcccgaaattgaggttacggctgtggcggataccaatcctgcccgtctggaggcaacgagggcgttgctgaacaagcggcgggcggattatcccgacctgcagcagccggatatcgcgctgttcggaacggcggaggagatgctgaactccgggctgattgatgcggtggagattgccgttccgcactacgatcacccccggtacgcgattgaggcgatgcgcgcgggcattcacgtcatgtgcgagaagcctgcgggtgtatacaccctgcaggtgcgggagatgatggaggaagcggacaggcatcccgacattgtgttcggtatgatgttcaatcagcggacaaatcacgtctaccgcaaaatgaaggagatcatggattccggcgcgctggggccgatccggcgcaccagctggattattaccaactggtaccggaaccaggcgtactatgattcgggtgcgtggcgtgccacgtggtcgggcgagggtggcggcgttctgctcaatcagtgcccgcataacctggacctgtggcagtggatttgcggtatgccgcgccttgtcgatgtccggatgcactttggcaaatggcacgacatcgaggtggaggatgacgtgacagcgtacgtggagtacccgaacggcgcgaccggaacctttattacctcgaccggggatacgcccggcacgaaccgttttgaaatcgtgtgcgatggcggcacactgaccacggacggcggcacactgcatttgaccaagttggaggtgccggagtcggtgttcacgcgggagaataaaacgccctttgccagcccgaaagcggcttcctgcaacgtggaaacggacggcaaaaacgagcaacacgtcggcgttatgaacgcctttgccggggctattcttcgcggagagcctctggtggcagacggcagggaaggcatccggggactgactatttccaatgccatgcatctgtccgcgtggacgggcaagccggttgaactgccgctggatgagcatctgttcctcaatctccttctggagcacgtcaagacgtcccgccgtaaagagggcattgagtcggtcttcgcgtctaccgagggaacctacaacgcgtaa

SEQ ID NO: 370 - DNA, 789 bp, Unknown
  Unknown gut bacteria
atgaaacgcattctttctgttgccctgattctgctgctttccgcctcaacgctggcatcctgtaacccggataccggctcggaatccggcacgactgccgtaaccgatgcgaccggcggatccgtgacggagaccgcgaccgaaacgcagaccgaaatgcccaccgagaccgtcacggagcccgggacggacgcgcccacggagcctccgaccgaggcttccgccgagccgtccgataccgaggcgcccgacccgctcgagacgcccgtgcgcgtcggaaccggctatgacggcaagacagcctgctatgacggcagactgcgccatatgtatgagtccttctcgaccagctacggcggaacctttgattcggtgcaggaagcgatggacagccttgccggaatgggcggcgctatcagtgcggcttttaacggtgacatcgggctttgcctgtctgtcaaggttccggatgacggcaagaagtacatcctgtactacaacttcaacaactgcgatttcgtgttcaacttcggctgtacgtttgacgacgggaacggcggctatgcgtactactcctcactcaatattctggacgatatggcagaggatctggacggctgtcatgtgtacgtctggagcgaggaggaaggtctggagcccggttactacctcatgacatgggtcggaaacgggaagggaaccgtcggtcgcaactaccgctacgataaggagggcgaccttgccgagacgtgggagggtctgcccaaaggcgagtcatactttgactga

SEQ ID NO: 371 - DNA, 801 bp, Unknown
  Unknown gut bacteria
atgacgcaacgtaatacgactacagaaacctccgatctgtcggttcatgccggacaccgccagcgcctgcgggagcggttcctgcgcggcggacccgatgacctcgccgcacacgaattgctggagcttctgctggggtacgccatgccgcgcgtggatgtcaacccattggcacaccgcctgatcgagcggttcggctcactgtccggcgttacggaagcatccgtggaagagctgatgtcggtttccggcgtcggcgaatataccgcgtgcctgatacgcctgctgcctgccgttgtgcgccggtgtgccatcgaccgggtggagtcgccccgcgtatacgacacggtgggaaagctggtcgaatttctgcgcccccgctttaccggactgacgaccgagcgcgtctatctcatcctgctggacaacgggatgcacatgatcgactgccgcgtcatctccgagggctccgtcaacagttccgccgtcaccgtccgccggattgccgagttgtgcctgtatatgcacgccgcctgcgccgtgctggcgcacaatcatcccaaagggatcgcggttccgtcgagtgcagacctggacgtgacgcgccagattgaaagcgcgctggagcttatcggcgttccgttgctggagcatctcatcatcacggagttttcggaagcgccgatcctccgtccccggcggggcatgacacgcctctcgccgacatccggcaaggttgacgccgccttttaccgctttttctacggcgtcccggaagaggaaggagagcagaagccgtga

SEQ ID NO: 372 - DNA, 579 bp, Unknown
  Unknown gut bacteria
atgaatcgggaggtattcttcatgaaaaaagctgtcctgcttggtgactccatacgcctgctggggtacggtacgcgcgtgcctgctctgcttgctccggatattgccgtttggcagtccgaggataacgggcgtttcacatcctatacactgcgtacctgctttgattataaggcggagcttgaaacggcagatgttgtccattggaacaatggactgtgggatatgtgtgacctgttcggagacggaccgtttacgccgctccccctttataccgatgcattggtgcgcattgcccgcatcctgcaaggctactgcccgcgcgtcatttttgccaccaccacgcccccgcgacctgaaatgtgggggcatgatatagaacgtgtccgggcgtacaacgccgccgccgtcgcagtcctgcacccgctgggggtacagatcaatgacctgtacagtctcatagaacctgatatgcagcacctgatccgcgacgatgatctcatccatctgacggatgcgggcattgaactgaccgccgcacaggttgcccgttccgtgcgggacgccttggcggagtag

SEQ ID NO: 373 - DNA, 1698 bp, Unknown
  Unknown gut bacteria
atgagcaactcctggactctgcaaagagacaccgccgtccgcgttctgcgcccggaaggtgccgtgtatgagactgccgccgcacagcttctgcactatctgaacgcactctgcggcatcaccgaggcgcggagccagtccgcacccgcgatcatcctgcggactgacccctctatgccgccggatgccttccggctggttgtgcggggcaacgacctgcaccttgtcgggcagaacggacgcggggtgctgtacgccgtgttcgcccttgcagagcgtttcggctgccgcttcttcgcccatgacaccgaggtgatcccccacccggcggagctgtctctgcctgacgggttggatgtgaccgaggcatccccgtttgcctaccgcgacctgtactggatcggcaccaccgatccgctgaccgccgtcaagctgcgcatcaacggaacgggactgaaatcaggtcagcacatccgccatctgacagccgaagtcggcggcggcatcggctacgccggaccgcacttcgtgcataccttcgacctgctgctcccgcctgaaaagtatttcgccgaacaccccgaatactacgcgctgatcgacggcaaacggaccgcaaaacacctgtacagtcagccctgcctgtccaaccccgatgtcctgcgcattatgatcgagggcatccgctcgtggctccgtgacaatccggaggcgcggctggtgtcggtctcgcagaatgacagcttcgtcatcggctcctactgcacctgccctgcctgcagggcggtcaacgaggaggaaggcgcgccttccggctcgctgatccgcttcgtcaacgctgttgcggaggcactggagccggaattcccggaagtcaccttcgacacgctggcgtatcagtactcgactcagccgcccaagctgacgcatccccggcacaatgtcgccatccggatgtgtaccggcggttgctcctcgcacccgatctccgactgcgccaacaacgccggttcggcggatgccatccgcggctggtcgcagatatgccgtcagctgtatatctgggattataccacggactttgcccaatacctcaacccgtacccgaacttccagacgttgcaggacaacatccgcttcttccgcgaccacaacgtctgcggcgtgttcgagcagggcaactataacgaaggtctgtccggcgagttcggcgagttgcgtgcctacctgcttgccaatctgctctggaatcccgaatttgacgtagagtccggcacagagtccttcctgaacgcctactacggcggcggtgcgccatatgtacggcagtatctgaccttcatccgggacaaggtacgggatgttcatttcaatctggtcatcagcgccgccgctctctggaacgatctcatttcggacgaagagcttaccatgctggatcgcctgtgggcagatgcctaccgtgccgcgcgcgaaggcggcgatgtcccggacggcatttcctccgccctgtgcgcctcccatgtggagcgcagcgggctgtgccaccgctggttcaagctggacgccaaacggggtgaattctcctatcctgcccgctttgatgccctctgcgacctcttttaccgtgactgccaccgcctcggcgtcacccgcctgaccgaaggcgcgaacgtgccgtgggttgaggcgcagtaa

SEQ ID NO: 374 - DNA, 1185 bp, Unknown
  Unknown gut bacteria
aactggggcgacgagggcaaggggcgcgtggcggatctgctctcccgcgacatggatatcgtgtgccgttgtcagggcacaagcgaggcgcgccacacggtagtgaacgagcgcggcagctttatgctgaatcagctcccttccggcattctgtacggcggtgtatgttgcatcatgggagacggaatgtatatccagccagaccgcctggacgatgaaataacacgcctgcgcgatgccggggtagacatctcgccggaaaacctgaaaatcagccgccgtgccgcgctggttctgcccggtctgactgcgacgcagatgcgtcttctgctggaaacgcgcgaccgtctgtgcatgggcgacctgacggatgtcgaaatgctggctgagcatctgaatgcattggcggatgcgttccgccgttacggcggaaaaccgaatatgtcggcttggtctgcgtgctgtcgccgctatacggcactgttcggcgactatattgccgacacgggcgcctatctgtacgacgcggagcacgccggaaagcgtattctgctggaatcccagtcgggcgctctgcgtgacaaggatttcggcgtgttcccttacggctcgccgacaaactgtctggcagcctacacgcccatcggtgccggtatgcccggcgtgcggctctcccgcgtggttggcgttatgaaagcgtactccgcctgccatggggacggtccgttcccggctgaaatcacgggtgaggaggcaacctacttccgtgaactgggacaggaggacgaggacggcgccacgccccgccgtgtcggcggttttgacgcggtcgcgtcccgctacggcgtccgccttcagggcgttgatgccattgcactgaccaagctggatgcggtatccttcctgccgcagatccccatctgtgtcgcctacgaagtggacgggaagcgtgtcacggatttcccgacaccgtccgccctgcggcgcgcaaagccgatatatgaatacgtggacggctggaactgtgacatctccggttgccgggcattcgcagatctgcctgttcaagccatcatctacatcaggtacctggaagagttggtcggcgcgcccatcacctatgtgtcggttggcgccgaacgggatgcctacatccgggacagtgtaaaagcggaaattcagtaa

SEQ ID NO: 375 - DNA, 906 bp, Unknown
  Unknown gut bacteria
atgacggatttcatgaaagccatggcggatgaggtcgccgtccagggcggcgagggatgctattacacggttgtaacgctggagccgccgcaggagggtgacaccctgtaccatatggaaaaggtggatttccgccccggcaacccggcacatgactgctactcggtagccaagagtgtggcggtcacggcggcaggtctgctgtatgaccggggactgctccgtccggaggacacgctggacagattcctgtccgcctacctgaccgggaaaactgacccgcgctggggcaggctgacggtggatcagctgctgcgccaccggacaggcgccgcctccggcgtagattttgacctgaccaatgcgcatctgtgggaggatccggagtggctgcataccctgttcgcggctcccatcacgcagacgccgggcgaggaatttgtatactcggacgggaactattatattttggggcgcatcgtggaggagctgctcggcgaggacatggagaagctgttgctgcgcgaggtctttgtgccgctgggattccatgccaatgcgtggagccgggacgtgaacgggcacaccgtcggcggcacggggctgtacctgcgcacggaggacatggcgaagatcggctggctgtacctgaaccggggcgcgtggggcgaccgccgcatcttctcggaggcgtgggcggatatcttcctgcatccgccggtagacagggtgcggtacggctacgccctgacggagacgaccgccgacctgtatctggcgggcgggatgtacaaccagggtttggactttgacctgcgcacgcggcgtgtggtggcgtggcacgcctttgacgaggcgggcagcttcccggggctttcgcaggcgttcgtgcggtactgccgctga

SEQ ID NO: 376 - DNA, 870 bp, Roseburia inulinivorans
atggatttcttatgggataagatcacggaatggctgaaagaaatgctcatcggcggtatcgtgagcaatctgtccgggatgttcgatgcgaccaatcaaaaggttgccgagatctccggtcaggtgggcttatcgccgcaggcatggaacggcagcattttcagcatgatacaaaacctgtcggaaaccgtgatcgtccccatcgcaggcgcaattctcgcctttgtgatgacgctggaactgatccagctcattaccgacaaaaataacctcaacgacatggacacatggatattcttcaagtgggcgttcaagtccgctgccgctgtcctgatcgtgacaaacacatggacgattgtaatgggcgtgttcgatgccgcccaaagcgtcgttgccagcgcctccgggctgattatcggcgacaccagcatcaatatttcaagcgtcatggtgggcattgaggatcggctgatggaaatggagctggggccgctgttcggcctgtggttccagtcgctgttcgtgggtattaccatgtgggcgctgaccatctgcattttcattatcacattcggaagaatgattgaaatatatctcgtcacctctgttgcccccattccgatggcgaccatgatgggcaaggaatggggccgcatggggcaggactgcatcagctccctgctggcactggtcttccaagcgtttttgattatcgtctgcgttgccatttacgcggttttggtgcagaacatcgcgcttgtggatgacatcatctacgccatctggacttgcatgggctacacggtgctgctgtgcttctgcctgttcaaaacgagcagccttgccaagtccgtgttcaatgcacattaa

SEQ ID NO: 377 - DNA, 441 bp, Roseburia inulinivorans
gtgcagatcatggcctatgtcaacgtcccaaaggacttaaccaaagtaaaaaccaaggtgctgttcaacctcacgaaacgacagctcatttgcttcggaagcggcgcgctcatcggcgtaccgctttttttcttgctcaagggcagcatcggcaccagccccgccgccatggtgatgatggtggtgatgatcccggctatgctgttcgccatgtatgaaaagaacggtcagccgcttgaggtcgtcatccgcaacatctaccgtgtgtgcttccagaggccgaagcagcgtccgtataagaccaacaatttttatgccgttctggagcggcaaaaccagttagaccgggaggtgtatcaaattgtccgaaaagaaaaagctgacccgcgccgaacgaaaacagatcgaagccgccatcgcaagagcgaaccgaacggataa

SEQ ID NO: 378 - DNA, 1851 bp, Roseburia inulinivorans
ttgtccgaaaagaaaaagctgacccgcgccgaacgcaaacagatcgaaaccgccatcgcaagagcgaaccgaacggataagaaagaaaaatcggcgcaggacagcatcccgtatcagcgtatgtggccggacggcatttgccgtgtgaccgacacacgctacaccaaaacgatccagtatcaggacatcaactaccagctctcgcagaatgaggacaagaccgccatctttgaggcgtggtgcgatttcctgaactactttgacagctccgtgcaattccagctttcctttgtgaacctctcggcttcgcaggaaacctttgcacggagcatttccattccgccctgcggggacgagtttgacggcatccgcgccgagtacgccggtatgctgcaaaatcagcttgcccgcggcaacaacggcctgattaagaccaagtatctcacattcggcatcgaagccgacaacctccgcgccgccaagccccgtttggagcgcatcgaaaccgaccttttgaacaacttcaagcggctgggcgttgtggctgcgccgctgaacggctttgagcgcctgcacgtcatgcacgacattctgcggatggacgagcaggagccgttccgcttttcatgggactggctggctccctccgggctgtccaccaaggactttatcgcgcccagctcctttgagttcaagaccggcaggcagtttcgtatgggcaaaaagctgggcgcggtcagcttcgtgcagattctggcaccggagctgaacgaccggatgctggcggattttctggatatggagagcagcgtcctcgtcaatctccatgtgcagtctgtggatcaggtcaacgccatcaagaccgtcaagcgcaagatcaccgatctcgacaagtccaaaatcgaggaacagaagaaggcggtccgcgccgggtacgacatggacattatcccgtccgacctcgccacctacggcgcagaggctaaaaagctgttgcaggatttgcagtcccgtaatgagcgaatgttgctgctgaccttcctcattctcaacacggcggacacacctcggcaacttgacaacaacatcttccagacctccagtatcgcgcagaaatataactgtgcgctgacccggctggacttccagcaggaagaaggactgatgagcagcctccctctggggctgaatcagatcgagattcaacggggcttgaccacctccagcgtggcgatcttcgtcccctttaccacgcaggagctatttcagaacggttcagaggcgctgtactacggcatcaatgccctgtccaacaatctcatcatggtagaccggaagctgctgaaaaatcccaacggtctgattttaggcactcccggcagcggcaagtcgttttcggcaaaacgcgagatcaccaatgcgtttctcatctgccccaaggatgacatcatcatctgtgacccggagggcgaatatacaccgctggtggagcgtttgcacggtcaggtcattaagctgtcgcccaccggcaagggctacgacggttcgccctgctacatcaatccgatggacttgaatctggattacagcgacgatgataacccgctgagcctgaaatccgacttcattctgtcgctgtgtgagttgatcgtcggcggcaaggacgggcttgcccctgtggaaaagaccatcatcgaccggtgcgtgcgcatcgtctaccgggactacctcaatgacccgaaaccggagaatatgccgctgctggaggacttgtataacgccctccgtgcgcaggatgaaaaggaagcgcagtacatcgccactgctttggaaatctacgtcaccggctct

SEQ ID NO: 379 - DNA, 249 bp, Roseburia inulinivorans
gtgaacgatatgaacccgaaaatcatgaagctccgtggagagctggagaagaacaaatgcaaaatctccgatctgcaaggccgcaaccgcgagctggaaaagcagattcgtgagctggaggacaccgacatcatcggcatggtgcgcgagaacggcatgacgatggaacagtttgccgagctgttccgccgtatgcaggccgcgcctgcaccggccacttcggaaaaggaggcgttgaaccatgactaa

SEQ ID NO: 380 - DNA, 1023 bp, Roseburia inulinivorans
atgaaaagagaaccgcgtttgcagttttccgacgccgatcttgccgagccgaagctggaaaagcccatcaagcgggtgaaaaaagcggaggccaaggcggataaagcgcaggccaaaatccccaagaaaaccgtggtcaaaaaggaacgcggctttgatcctgccaccggcaaggtcaaaacgcagctccgttttgaggaagtggataagaaaaagccgccctcaaagctgacccatgccgtgcaggatgcccctgccaactttgttctctctcaggttcaccgagaggtgcggcagagcgaggatgacaatgtaggcgtagaggccgcgcacaaggtagagcaagccgtggagagcggcgggcggctggtgcagtctgcccaccgcgcccatcagctcaagccttatcgtgctgccatccgtgcagagaaaaagctggaacgagccaatcttgacgcgctccagaagaaagcagagatcgacaaccccaccagcaatcccgtttccaaatggcagcagaagcaggccattaagaagcagtatgccgctgccaagcacaatcaggcggcgcagactacggcaaaggcggcagagaataccgccaaggccgcgaaaaaagccgctgaaaaggctgagaaagcgggcaaatatgtgtgggaacaccggcgcggctttgccattgccgccgcaattctgctgatgctggcatttctgctcaacggcctgtcctcctgctcggtgataatggatggcgtcggctccgggatcgcggccagtacctatccgtcgcaggacgccgatatgctgggcgcggaagcgcagtattgcgaaatggaggcagagcttcagcgctacctcgacacctacgaaagcacccatgactacgatgagtaccactttgatctggacaccatcgagcatgacccctatgtactcatttccatgattacggcactgcatcaaggggaatggacgctggatgaggtacagggtacgctccagatgctctttgaccgccagtac

SEQ ID NO: 381 - DNA, 1659 bp, Roseburia inulinivorans
atggcgagaaaaagcaggaaagaaacggctgcggtggccgtgcaggaggccgacgccgcttgccgcgccgcgatctacgtccgcctttcggtggaggatacccacacgcacagcgtatccattgaaacccagcagatgattattgcccgctatctggagcagtatccggagatcagcgtgtacgatacctatatcgacaacggcgcgaccgggacaaacttccaccgtccgggctttcagcagatgctctcggatattgaggccggtcacgtcaactgcgtcattgtgaaagacctctcccgtttgggccgaaacaccattgacaccggctattacatcgagcagtatttccgcatccgcagcatccgcttcattgcggtcaatgaaaacttcgacaccgccaacccggaggacgcccattccggtatcatcatcccgctgcggaacatgataaacgaagcatacgctttggacatcgggcgcaagatcagggcgcagcagcggcaggccatgaaggacggcaagttcatcggtgcgcgtactccctacggctatctgaaagccgaggacgattgccaccagcttatcatcgaccccgttgccgccgttgtggtgcagcggatgttccgttgggcgtccgatggtgctggcctcaatactatcgccgtgcggctgaatgaagcgggcatcctcactcccagccactataagaagatgcagggcaagatcacccacgcaaatttgctcggcaacggcaagtggcagacccgaacggtcggcgttattctccgctccgaggtctacaccggagatctcgttcaggggcagaccaaaaccgtggatcaccggcaggtcaaggccgatgccgaggaatggacggtggtgcgggacacccatgaggccataatcagccgggaacagttcgcggcggtgcaggaaattctcaatcagaccgccagccgcgccaaggcacgggaggtcaaagcctacacgccgaatttgctcaaaggcaaggtgttctgcgcccattgcggcggcagcctgcaccggcagagaaacatccgcaagaagtccgacgatgtgtacttctaccattgtctgagccagagccgaatcagcaaggatgcctgccccggtgtgaccatccgcgaggatatgctgctggatatgctggcagatatgcttcaggacgcgcttgatacggcgctggggcaatacaccctctcccttgcagagctaccccggcaggccgctgaacgtgccgagctgcgggagaagatcaccagccgcaagcaggaaatccagcggcttcgcggtatcgtgcggagcttatatgaaagcctcgtccaaggcgttcttaccaaggatgaatatttcgactacaaggaaaagtacgaaagccgcattgccgacctcgccgtggaaatggagcagttggaggacggtctgcggacgatggatacgcagattgagcagcaccgggcgctggaacaggacgccgcgcagatcaagaccgaccgtgcgctgaccggcgcactcatcgagcggctgatcgaccgcatcgaggtatcccacgacaagcagatcacggtgcgctatcgcttccagagcgagtttgaaacctatgcggaggtgctggaacaatgcagaaatatgtga

SEQ ID NO: 382 - DNA, 1035 bp, Roseburia inulinivorans
atgaagcaagtcaacgtcaaaaagctcatccttcccaacatcccgtatgtgttcatcgcactgctggccaccaaggtcagcgaggcggtgcggctggctcccggttcagacgcttcggcgaagctgctgaacattatgaccggcctgaacacagcgtttcactcccttgtccccagctttcatcccattgacctgtgcgtgggcgttgccgccgccatcgccattcggctggcggtctatatcaagggcaaaaacgcaaagaaattccgcaaaaatctggagtacggcagcgcccgttggggaaccgccgaggacatcaagccttacgtcgatcccgcgtttgaaaacaacatcattctcacgcagacggagcggctgacgatgaataaccgccccaaagacccaaaaacggcgcggaacaaaaatgtcctgatcgtcggcggcagcggttcgggcaagacccgcttttggttgaaacccaatctgctccaatgcacatcaaaaacctatcccaccagcttcgtcgtcaccgatcccaaaggggacatcgtggtttcctgcggccatgcgctgcaaaagaacgggtatcagatcaagattctcaattccctgaacttcaagaagtccatgcactacaacccgttcgcatacatccactcggaaaaggacattttgaagctggtcacgacgctgatcgccaacaccaagggcgagggcaaagccggtgacgatttctgggtgaaagcggaaacgctgctctacaccgccctcatcggctacatccactatgaagcgccgatggaggaacagaacttctccacgctcattgaatttatcaatgcgatggaggtgcgcgaggacgatgagaacttcaaaaatccggtggacttgatgttcgacgagctgaaaaagcgcaagccagaccacttcgccgtccgtcaatatgccaaattcaagctaagtgccggcaagaccgcgaaaagcatacttatttcctgcggcgcacggcttgcgccctttgacattcaggagctg

SEQ ID NO: 383 - DNA, 1635 bp, Roseburia inulinivorans
atgccaaaaaacaaagcaaccgcttatatccgcctgtcctacaccgacgatcattccagcgaaagcgacagcgtttccaatcagcgcaagctcattgaaaactttgtagagcgcaacccggatattgaggtcgtttccgaaaagatcgacgatggatacagcggcatcatctttgaccgccctgcgttcaaggaaatgatgcaggatgtcaccgatggcaatatcaactgcgtcatcgtaaaagacctctcccgcttagggcgcgagtacatcgaaactggccggtatctgcgccgggtattcccggcctacggggtgcgcttcatcgctatcaccgacagcatcgacaccgcccacgacagcggcgatgatctgaccgtatcggtcaagaacattaggaacgaaccctactgccgggacatttccatcaagacccacacctctctggacgtgaagcggcgcaacggcgatttcgtcggtgcgttcccggtgtacggctacatgaaagccgaggacaacaagaatttgctcgtccctgacccctacgccgcccgcgttgtctgcgacatcttccgtatgcggctggagggcgcaagcgcctccaagattgcatcagagctgaaccggctgggtatcctctccccgctggcttacaagaagaacaacggtctgccctacgcgaaaaagggctatgcggacaaggctgactgcaagtggtcggccaccaccatcatccgcatcttgcaggacgaaacctacaccggaacgctggtgcagggcaaacagggtacgccgcattacaagatcaagcagatggagcagcgccccgcctccgagtgggtgcgtgtcccggatgcccacgaagcattgatcgcccgtcaggattttgatctggtgcagcgcatcaaggggctggatacccgcacttctcccaacgaggacacggtgtacctgttctccggtattctgatctgcgggtgctgcggaagccgcatgacccgcaagaccaaccgtgcgaacggcaaggagtaccactactattattgtcctaccggcaagaaaaagggctgcgcccatccggtcatgctgaaagaaagcagcctgatcgactgtgtgcgggacagcctgaaagcctatatcggcaatattgcttctctggaggcgctgctgaccggcattgaccagtccagcatcaatcaggcgcttgccaaggaatacagcgaccacattaccgacaacgagcgccggttggagcaggtgctggagttcaaggcacggctttatgagagccttgtgggaggtatgcttaccaaggaagaatacgcttcctataaggcaaagtacaccaagcaggccgaggacatccgcgagagcatccgcgttctcaaggaaaaactcacggaggttttggaaaaccggagtgagcgcaaccgctggatttcgcagtttacgcagttctccacgctggaaaccttagaccgcagggcgctcattcacatggtacagagcatccgcgtccgtggcaaaaaggagctggatattacctttacccatgaggacgaatacaaaaaggcgttgcagcttttggcgctggcagcgcagcagaaagattacgaacagagaaaggtgggctga

SEQ ID NO: 384 - DNA, 561 bp, Roseburia inulinivorans
acgctggaaaacttcaatctctctcatgttcccgtttacattatgagcgaagaacagctcggaatgtacgccacctatatggccaccctcggcaaccgtcccgacctgttccccggttcaggctacatcggcaagtatgtggagggcagctataccgactacgacattcccccggaggcgctggacgatgaggtatttgccgccatcatccaggaagcggaaaagtatctcggctacgcctacgtttggggcggcagcagtccctccacctcgtttgactgttcgggcttcgtcagttgggtcatcaatcattccggttgggatgtgggcagactgggcgcgcagggactttgcaacatctgtacgcctgtatcctctgctaacgtcaagccgggcgatctggtgtttttcaccggaacgtatgatacccccggtgtcagccatgtgggtatctatgttcgcaaccatatgatgatccactgcggagatccgatctcttatgcgaacttaaattcaagctattggcagtcccatttctaccgctatgggcgcttgccgtaa

SEQ ID NO: 385 - DNA, 810 bp, Roseburia inulinivorans
accgatgctatggcgatctaccagctacgccgggatgcgccggttgagctgcgttttgccagtctcggcagactggccgcgtcgcctgaccccgccaactatgaagccatctatacccgtgaggtgtaccctgacgatgataccggcagaatccttgaaaacttctactacattttcaacgacgagcgccccggcgattttgtgggacatagcctctccgtcagcgacatcgttgcgctgaaacaggacggcaaggtatcctatcactactgtgacagcatgggatttcaggagctgcccgcctttcagaagccggagtattacctaaaagcctccgagatgtcgatggaggatggttacggcatgatcgacggcattatcaacaacggccccaagcagcccaccgttgccgaccttgaagcacaggtcaaagccggtatgtccatctccctgatggatttggcagaggcggcacaccgggaaaagaaaaagtctgtgctggagcagctcaaaagccaaccggcccaagaacgtccacacaaaaagcgcccaaaaagagcgcggaaaaggagctttgatatgaacatcacctttgaagaacgccagcttatgagcctctacaacaccggcacccgcacgggcttgattgcggcgctggaggaaatgcgcggctacctcgctgcggatgaaacggagctgcgggagctgacggacagcgccatcgcaaagctgcgcaggatgagcgacgcggaatatgacgagcttgacctgttccccgattttgaaaaggaggatatggatgccgagtaa

SEQ ID NO: 386 - DNA, 1011 bp, Roseburia inulinivorans
atgccgagtaaagtacagctctatgcgcagatggcagaccgcacggcggagcagatcacgggaagctaccagaagtggacggcatttctgaccaccgccgcaaggctgtataagtacccctacaatgaacagctcatgatcttcgcccagcgcccggaagccacggcctgcgcggaatacgacctctggaataagcagatgcgccgctatgtgcggcgaggcagcaagggcatcgcccttgtggataccagcagcgaccaacccaaactccgatatgtatttgatgtttccgacaccagcggcggcgagaactctcgccgcccttatctttgggaataccggcaggagcatcgtgaggtggtatctgcggcgctggagcagcgctttgacgtttccggtgaaaacggacttgccgatcagatggagcgtgtggcggcgcagcttgtagatgaatactggcacgacaactggcgcgatattgtcggcatcgttgacggttcctttttggaaggttatgatgatttcaacatcggagccgcttttcggaacgccgccgttgtcagcaccacctatgcgctgctgtcccgctgcgggatgcagccgggagattacttcgagcatgaggattttctgaacgtctttgatttcaacacccctcagaccgtcgccgctcttggaacggccatcagccagtccagcgagctggtgctgcggcagatcgaaatcaccatcaagaattacgagcgcgagaaaatcgcggaaaggagcgaaagccatgagcgaactgacctacacccgcagcggggattatctgattcccgacctgagcctgacagagcagccgcaagccccgctgggcaagtacggcaggatgcggaaggattacttgaaggagcatcgtccggtgctgtggaacagcctgctgctgtccgagaggctgtacccccatctgcgggagatcgacgaggcagcgaacaaccgactggaacagatgatgccggagctgatgaa

SEQ ID NO: 387 - DNA, 1875 bp, Roseburia inulinivorans
gagctttacaccatccagcgctatttgcagcatgaccggctgcgagagatgggtatgggccacttcgattgctgggcaagccgctttggtgaaaccaccaccgcgctggagcttgccccggagggaaccggctaccgggcaaggacgcgctttgcaaagtttttcaacttgcccgaattgatgaatctgttcaaagaggttgccgacatcaaaacggcggatcagctccacttgcccacgccggaggttgcgtatcacaccatcgccaccaaacccacgcagatccagcaggacatggtgaaagccctctcggaacgagcgtccaaggtacacagcggtgcggtcagcccggatgtggacaatatgctcaaaattacctcggacggacgcaagctggggcttgaccagcgcatcatcaatcccatgctccccgacgaggaaaccaccaaggtcaatcaatgtgtggcgaacattctccaatactggcgtgacggcgaggaggaaaaactgacacagcttgtgttttgcgacatttctacgccaaagaccacgccctcgcagcgggcggcaaaggcttcccccggtacgctggacggcccggaaattcatgcgctggagagcgcgatttcattggaggaaagctctgacacgccgttcacggtctatgaggatgtgcgccaaaagctcattgacgccggtatgcccccggaacaaatcgcgttcatacacgacgccaacacggaggtcaaaaagcgggaactgttcgcaaaagtcaggagtggtcaggtgcgcgtcctgatgggcagcacggccaaaatgggcgcaggaaccaacgtgcaggatcgtttggccgcacttcacgatttggattgcccgtggcgtcctcgtgatctcacacagcgaaaaggccgcatcgagcgtcagggcaatcagaacaagctcgttcatgtctgccgctatgtgaccgaggggacgtttgacgcctacctctggcaaacggtggaaaataagcagaaattcatctctcagatcatgacctcaaaatccccggttcgctcctgtgaggacgtggacgctacagcgctgtcctttgcggagatcaaagcgctatgcgccggtgatccccgcatcaaagagcgcatggatttggacatcgaggtgtccaagctcaaaattatgaaagcagaccacaacagcaagcaattccgcttggaggacagtctgctgaaatacttcccggaaaagatagaggaacacaagggctttgttcgtgggctggatgcggatatgcagaccctcgcggcgcatccgctcccggcagagggctttgtcggcatggagattcgcggcgaccggctcaccgataaggaaaacgccggtgccgcgctgctggacacctgcaaggaggtcaagggcaaagacccggtacagatcggcagctatcgcggctttaccatgtccgttgcttttgattccatgtggaaaacgtacacgctgacgctgaaaggccggatgacacatcgcgttgaactcggttcggatgccagaggcaaccttgtccgcatcgagaacgcgctggataaaatgccggagcgtctgcgcagcgttcaggagcagcttgaaaacctctataaccagcaggcggcggcaaaggccgaggtcggtaagccgttcccgcaggagcaggagctggccgcaaaaacggcgcggctgattgagttggatatggagctgaatctggacggcaagggacagccgcagcctgagcaggcgattgcaaaatcggcgcggccttccgttctggataggctgaaagcgccgcctgttcatggcgcaccggaaaagccccacaaaaaagaaatggaggcacgataa

SEQ ID NO: 388 - DNA, 591 bp, Roseburia inulinivorans
atcgccaccgctttggaaatctacgtcaccggctcgctgaatgtgttcaaccatcacacaaacgtggatgtgaacagccgcattgtctgctacgacatcaaggagctgggcaagcagcttaagaaaattgggatgctcgttgtccaagaccaagtgtggaaccgcgtgaccatcaaccgcgccgcccataaaacgacccgctactatcttgacgagttccatcttcttttgaaggaggaacagacggcttcgtacagtgtcgaaatctggaaacgctatcgcaaatggggcggcatccccaccgggatcacgcaaaatgtcaaagacctgttatccagccgcgaggttgagaacatttttgagaacagcgatttcatctatatgctcaatcaggccgctggcgaccggcagattctcgcaaagcagctcaacatttcgccgcatcagctttcttatgtgacccactccggcgagggcgaggggctgctgttctacggcaacacgatcctgcccttcattgaccacttccccaaggacaccgagctgtaccgtgtcatgaccaccaaaccgcaagaggtggcgtcggcatga

SEQ ID NO: 389 - DNA, 846 bp, Roseburia inulinivorans
atgattaagactgcacggcagctcaaagacctgatacgcaatctctccaaggacaaatccgcagatgcgcaaatcctgatgcgcaattacatgatggagcgctttctggagcgcatttctctttcggaatatcgggacaagtttatccttaaaggcgggatgctggtggctgccatggtcggccttgacgcccgctcaacgatggacattgacgcgaccgtaaagggtgcgacggtcggcatcgaagaagtagagaatatgattgcctccatcatctccgtaccggtggacgatggcgtggagttccggttgaagcgcatttccgagatcatggacgaggccgagtatccgggcatccgtgtcagcatggaaacggagtttgacggtgtgataacgccgctcaagatcgacatttccaccggcgacgccatcacgccccacgaggtgcgttacagctttaagctgatgttggaggatcgctccatcgaaatttgggcgtacaatctggaaaccgttctggccgaaaagctggaaaccgtcgtgtcccgcgccaccaccaacacccgcatgagagatttctatgatctgcacattctgagccagctccacggccagagcatcatcccagccgatctccgtgcggcgctcattgcaacggccaggaaacgcggtactgagaagtaccttgccgacgcgcctgcggcctttgatgaagtcgaggccgacccgaacatggaaaagctgtggcgggcttatcagaagaagttctcctatgctgccgacctgtcgtggcatacggtcgtggaatccatccgcagtctatatagattagcgcgggctgaataa

SEQ ID NO: 390 - DNA, 603 bp, Roseburia inulinivorans
gcggagaaatcaaaatccgcaaacacgccgtcgtcattgaggggcatatcctccctgaccggaaaaagcggcgtcactaaagtgattggaggaattactattagcagagtaactgagctggaaaaagcgctgaccacgctgttccgcaagggtacggaggtcggctacacggaaacggagatcgacgagttcctggaaaacatcgactatcacgccctgctgcaagccgtttggaacaaggccgaaacggcctatgcctaccgtgcagatggcaagaatgcgctgagcttggactatcgaagcgcggagctgttcaagcagcgagcgacgcttctctatgaggacgtgggcgacagctatatcggcgcggtgtttgctgcccggtcgatggagctgtggctgctggaggatatgggctttgccgtcgttgccaaattcagcgtgaacgccggagaaggcgaatacgtcaccgagtatcgcgtctacaagggcagcgattgggcagacagcgagatttctctggatttggaggacttggtggccgagcttgccgccctgtgcgatccctactacgaacacgagcagcccatctatgagctgtga

SEQ ID NO: 391 - DNA, 339 bp, Roseburia inulinivorans
atggcaaaacgcaagcgggatattcagctcaaattccgcgtcacgccgcaggagcgggaaatgattgaaacgaagatggcacagttcggcaccaccaacatggcggcgtatctccgcaagatggcgattgacggatatgtggtgaagctcgaccttccggagctgcgggagctggtgtccctgcttcggtattccagcaacaacctcaaccagctcacccgccgcgcccacgaaacaggccgcatctatgaggccgatctggaggacattcagcaaagtcaggagcggatatggacggcggcagagaaaattgtttcctcgctggcggcgctgaaataa

SEQ ID NO: 392 - DNA, 216 bp, Roseburia inulinivorans
acaggatactacggaggatacggacacatgagatacttcaccaataatccgctggaacgcctgatgatgcagaagccgaaagcagcgcgggaggacagccctcccgacgctgccaaggaacacttctgctacggctgcaagcgcttcggacagagctgcgttcgcccctgctaccgtgacgtaaagagaatggaggctgcaccatgcgccttgtga

SEQ ID NO: 393 - DNA, 537 bp, Roseburia inulinivorans
ccctcccacagacttgagggggaaccctgcggtatgcgccagctctttgaggcagcggtatcgtggagttatgacagccctgccaagggcggcctgcatcatgcccactatccggggcgcgtggcaaataggatggatcttctcaaatggacaagcagagcggctgcgccggtattcgccattatgttatgtggctccaattctgcccgcgcagccgcctctcaaagtcagataccatgcgctgacgggctttcccatcagcgcattcatgtgaccttgaggaaacccaccaaaccgagaaaggagatcgccatgatgcagccaacgccaaacgaatcccgaatccacacggatgagctggtggacatccgggaagtatctgttgacaaaaatcttcccaaggaagaacgcattgccgcctttatccgccagatcaaaaatccctaccgcttccgctgcggcgatttcgtggtaaacgcctgctttgccgggaacggtgttacgttggaggaatgtctgcaaggcattttgcgctga

SEQ ID NO: 394 - DNA, 174 bp, Roseburia inulinivorans
atgcttctggcggtcgtttttcagctgctccagcagcttggcaacggctttgcgaaattcctgttcgcccagctttccgcaggagatcatcagggatacgattctctgttcaacttcttcctgcatgacttatcacgctcctttccttggatttgcagggagaatgccgggaca

SEQ ID NO: 395 - DNA, 240 bp, Roseburia inulinivorans
atgatcgtcggtgtaggacaggcggatataagcggtggctttgaatttaggcatgaaaaagcactcctttctcccggactgctcccgcatgaaaagagtggttatctggctatttggttttcatccttttccacaccgatcatagcactctctgcggaaaaaagcgaggatgtcgctcagcgcaaaatgccttgcagacattcctctaacgtaacaccgttcccggcaaagcaggcgttt

SEQ ID NO: 396 - DNA, 186 bp, Roseburia inulinivorans
gtggaagaaatgtaccctcaaaaatctaaaacatatttttcggaggtactatttatggctttctttaattctgctgttggtgttcttcagaccctcgttgtggcgctgggcgctggcctcggcatttggggtgcgatcaatctgctggagggctacggcaacgacaaccgtgcgatgcgttcctga

SEQ ID NO: 397 - DNA, 915 bp, Roseburia inulinivorans
atgcctgaaaaaaccgtgcagaaggaaccgggcaaaaagcccgcgccatccaaaaagccgaaaccacagcaggaagtggtcgttcagattccactctccgagctgcatccgttcccggatcatccctttcaggtgcgggaggatgcgtccatgcaggaaaccgccgaaagcgtcaaggaatacggcgtcctcgtccccgcgctggcgcggccacgggaggacggcggctatgagctgatcgcaggccaccgccgcaaacacgcctgtgagttggcggggctgaccaccatgccggtcattgtccgcgacattgaccgggacgctgccaccattatcatggtggacagcaacctccagcgagagaacattctcccctccgaacgcgccaaagcctacaagatgaagatggaggccatcaagcggcagggcgcacggacggatctgacttcgccgaaaatttcggcgaagttccgcagcgatgatgaagttggtcaggatgccggtgtgagcggcgataccatccgcaactacatcgccctgacgcagttagtcccggagcttcagcagatggtggacgaaaagaaaatcgccctcagtccggcgtatcagatcgcggcgctaacacccaaggagcagggcttgcttctggaaaccatcgacagcgagcaggccaccccctcactctcgcaggcgcagcggatgaaaaagctcagtcaaagcggtgagctgaatgaggacaccatgctctccattatgctggagcagaagaaaccggaaaaaaacgacatcaccctttccggtgaaaagctccgcaaatacttcccgcgttcctataccccgttccagatcgagaacaccatcttcaaattactggacgcatggcagaaaaagcgccagcgcgaccagagccgttga

SEQ ID NO: 398 - DNA, 327 bp, Roseburia inulinivorans
atgttcatcctgaaaattctctttgcgccgctgtcgcttatcctgtccctgttcgtttggctgtgcgcggggctgctgtcctgttccggcttcgtgttcaagctggcaagcggactgctctccttgctggctttcgccgtgctgattacctactccgtaaagaacggcatcatcctccttaggctggcgtttctgatcagcccgatgggacttccgctgctggctgtgcaggggcttggcaagctgcaagacgtgaactctgccatgaaaaacttcattcatagtaaaaacacaagccggggcgaacgcctcggcttgcttttctaa

SEQ ID NO: 399 - DNA, 621 bp, Roseburia inulinivorans
gacgccatgtatatcaacacattcaaatatacccccaaagatgtgagctgccagctctgtaccgagtatgtgaaaaagctgggctgtaccgccctgcgctgcccgtggctggccgagcgcatcgaggccggtgtggtcggctaccgcgaggcagtcttagagacatttccccatgaacgccgcctgttccagcgcctgaacctgctgatcaagcactatcccggaagcctttggagcaacgagcagcatgagcgcaggatgcagtatcagtgcgccgtgcagggctatcgccgccgcagagacaccaacgcctactatgcggccatgtacctgctgacctctaacgacgacatttaccgccgcacggcaaattgcttctgcaaggacgggatcgagttcggctatgcggtgctgaaaaacacctcgccgcacaactacgcactgttcatggctgcgcgcgacctctgcgacaagacggaggcggtcacgatggcggacttagcggaaccggaggtcattgacccggaggcgctgcgcctgatcgtcaatgccactctgatcgcccgctacgggcttgccgcctttcagatcagagcgcgaggtgccgaatatgaacgctga

SEQ ID NO: 400 - DNA, 165 bp, Roseburia inulinivorans
ctgcacgcacggtgtggagccggggaaaagctggagatcatatcaaatgcttacctatggctatctggtgctaaatctcagggcatgaagcagctgatggccggtggcggggtggctttgattggcattaccctcgtgccgctgctgtccggtctgttcggctaa

SEQ ID NO: 401 - DNA, 3036 bp, Unknown
  Unknown gut bacteria
cccggcagcaccgaacccctgaaggacggcgaagaagcgctggcaaaggccatcgagtttggcttccccatcatcctcaaggcggcagccggcggcggcggccgtggtatgcgtcgctgcgacaagcctgaagaagtcgtggcagcctatgacatggttcacagcgaagccctgaaggcgttcggcaacggcgacatcttcattgaaaagttcctggaacgtcccaagcacattgagatccaggttctggctgaccagtacggcaatgtcgtccacctgttcgagcgtgactgctctttgcagcgccgttaccagaaggtcgtggaatacacccccgctttctctgtggatcagtccatccgcaacgccctgtatgaagacgccatcaagatctccaaggccgttggcttcgtcaacgccggcaccctggaattcctggtggacagcaagggcaaccattacttcatcgagatgaacccccgtatccaggtggaacataccgtcaccgaaatggtcaccggcatcgacctggttcgttcccagatcctcattgcggaaggccgtcccctgagcgatcccgccattggcatctccagccaggctgacgtgaccacccgcggctactccatccagtgccgtgtcaccaccgaggatcctgccaacaactttgcaccggacaccggtaagatcaccgcttatcgtaccagcggcggtttcggcatccgtctggacgcaggcaacacctatgtgggcgcagagatctctccctactacgacagcctgctggttaagatcaccaccctggacaacacctttgagggcgcttgccgcaaggcactgcgtgccctgagtgagaccagaatccgcggcgtcaagaccaacatctccttcgtcagcaacatcctgtccaatccggtcttccaggctggccagtgctacaccaagttcattgatgacacacctgagctgttcaccatcagccagtctcagaaccgtgccaacaagatgctggaatacatcggcaacatcgttgtcaatgaccccaccgcaggtcagaagctgtatgagacgccccgcttccctgacgtacccgaaggggatcccaagcccggcctgaagcagtacctggatcagaacggccccgaagccctgagcaagtgggtgctggatcagaagaagctgctggtcactgataccacctgccgtgacgcccatcagagcctgctggccacccgtatgcgtacccgtgatatggtcaagtgcgcaccggctatggccaagatcctggcagactgcttctccctggagatgtggggcggcgctaccttcgatgtggcataccgtttcctgaacgaatctccctgggaacgtctggattggctccgtcgtgagatccccaatatccccttccagatgctgctgcgcggctccaacaccgtgggctacaccagctatcccgataacgtcgtccgtgaattcgtccgtctgtccgccgagggcggcattgacgtgttccgtatcttcgactccctgaactggctgcccagcatggaagtcgccattgacgaagctctgaagcagaacaaattcgtagaaggcaccatctgctacactggcgagatcaccgatacttctcgtaactacaccttgaagtactatgttgacatggcaaaggaactgaaaaagatgggctgccactccattgccatcaaggatatgtccggcctgctcaagccttactccgcaaaggttttggtctccggcctgaaggacgctctggatatccccatccacctgcacacccacgacaccaccggcaaccaggtggccaccaccttgatggcagccgaagccggcgtggacatcgcagaccttgccatctcctccatgagctccctgaccagccagccctctatgaacgctgtggtcgccgctctggaaggacaggaacgggataccggcctgagcctgatggatctgcagaagctgaccgattactgggcagacgtccgggaacgctatgtggacttcgagtccgacctgaagacgcctgtcaccgatatctatcgttacgagattcctggcggtcagtataccaacttgaagccgcaggtggagagcctgaacctgggacaccgtttcctggaagtcaaggaaatgtacaagaaggtcaacgatatgctgggcgacatcgtcaaggtcacgccctcctccaagatggtgggcgacctggccatcttcatggtgcagaacgacctgacccccgaaaacatcgtggaaaagggcgcagctctgagctatcctgactccgttgtcagctacttcaagggcatgatgggtcagcctgcatggggcttccccaaggatctgcaaaagatcgtcctgaagggcgaagaacccatctccgtccgtcccggctccctgctgcctcccgctgacttcgaggctgctaaggaacacctgcgcaaggtctgcggctatgaaccttctgagcgtgacgtcatttcctggctgacctatccgaaggtgctggaggactacttcaagaaccgtgcggaatacggctacatcacccgtttgggcagccatgtgtacttccacggcctggcagtgggcgagaccaaccgcgtcaacatcgaagacggcaagacgctggtcatcaagtatctgggtctgggcgaccgcaacaacgacggtaccatcaacgtccagtttgagctgaacggcatgcgccgtgagatcaacgtccaggataagcacgccaaggcttccgtccacgcagtggaaaaggccgatcctgacgatgtgatgcaggtcggtgcttccatccccggcgcagtcagcaaggtgctggtgaagaagggcgatgcagtgaaggaaaacgacgtcctgctcatcatcgaagccatgaagatggagaccagcgtggtcgcccgtgcagatggcgttgtcagcgacatcaaggtggaagcaggcgacagtgtggttgccggtcagctgctgatgaagctgaagaaagcagaggacgaagactga

SEQ ID NO: 402 - DNA, 2121 bp, Unknown
  Unknown gut bacteria
atgaaaaatgaccgttggtcaaaatggaaggaagggatcacggtgctgaaattcggcgaaaagatcgtcaaactgcgtatacccattctcatcgtcagtatcctgctgctcattccggcagcgatcggatacttcaacacccgtatcaactacgacatcctgtactatctgcccaaggacatcgacaccatgcaggggcaggacgtcttgatggatgaatttgggaaaggcgcctatgcgctgtttgtctgtgagggcatggagtacaaggacgtcgccaacctcaaaaccgacattgaaaacgtagaccatgtagcacaggttatctggtatgactctgttgccgacctgtccgttccggtggatgtgctgccggataaggtcaaggatgtgttcaattccaaggacggggacgccaccttgatggccatcttcttcgacaccaccacttcggcggacgagaccatggatgccattgaggagattcggagcatctccgggaagcagtgcttcctgtccagtatgtccgctatcgtcacggataccaagaacctggtcaaccaggagctggttccttatgtgctcatcgctgtggtgctctgctgcatcgtcctggcggtgaccatggactcctttgtcatcccagtgctgttcatgctgagcattggcatggctatcatctacaacctgggcaccaacgtgttcaaaggagagatctccttcatcaccatgtccctggtggctgtcctccagctgggcgtgaccatggactactccatcttcctatggggcagttacaaggaacagcgggagaccatagcggataagaacgaggccatggctcacgccatcgccgctaccatcacctcggtgaccggttcttccctgaccaccatcgctggcttcatcgccctgtgcttcatgagcttcaccttgggactggatatgggcgtggtcatggccaagggcgtcctgctgggcgtcatctgctgtgtcaccgtgctgccttccttgatcttggtctttgataaggccatctggaagactgctcacaagaccgtccacctgcccactgacggcttgagcgagttcgtcatgaagcactacaagctgtttgcaatcattatggtagtgctgtggattccggctctgtacggcaacgccaactacaacgtctactacaagctggacaacagcttgccagattacctgccctccgtgcaggccaaccaggagctgaacaaaaagttcgatatgaactccgtggaaatgatcctctgtcgggatgacctgtcccagaaggaggtcaaggccatgctgaaagagattcagaacgtggacggcatcaacttcgccctgggtctggactccctcaccggtgacctggtgcctgatgagctgattccccagtcggcacgggagaaaatggagagcggcggctatcagctgctgatgctcagctccaaatatgaagttgccaccgatgaggtcaatgcccagtgcaacaaggtggagcagatcctgaagaagtacgacgaaaaggggatgctcatcggggaggcaccctgtactcgtgacctgatcaagatcaccgaccatgacttcatggtggtcagtgcggtctccatcctggccatcttcgtcatcatcctgctggtgctgaaatccatctccctgccggtcatcctggtggccgtcatcgagctggccatctacatcaacatggctctggcctacttcaccggtaccacgctgcccttcatcgcctctatctgtatcggcaccatccagttgggcgctaccgtggactacgccatcctgatgaccacccgttacaaaaaggagcgtatggctggctgttccaaggaggaggccgtcaagattgccttgtctacctctatccactccatcatgtccagcgctctgggcttcttcgccgccaccatcggcgtggggctttactccgatgtggacttgatcggctccctgtgcctgctcatggcacgcggcgccatcatcagtatgtttgttgtcatctttatcatgcccagtatgtatatgctgcttgataaactcatctgtaaaaccaccctcggcttacgcaatacggtggatgtctaa

SEQ ID NO: 403 - DNA, 2352 bp, Unknown
  Unknown gut bacteria
atgggagcaaactactttacaccggaaaacgcttggcggcatctgttcttcatccacggctgtaccgcagatgagttctacaccgatggcggtctaaagctgaatatcgagcagctgacccagctggagctgaagcgcagcggctatgcgcgggtggtcttttacgacaaggatcagaagctctactgctacgatgacgaatccttcgccctcctgcgggggcggagcggtgcgggcaaagaatcggctcccgcaccggaaggcgctgcgcccacccatcggaagggcggcctgaaacggggcaagctgggcaaaaaggcggctgcgtcagcagagcctgtccagccggtggaggcggaagccgttcccgaccagccggagcagaccaatggaacgtggacgcccggcgccgcctccggcatcggcatccgccggatgggcgatggctcgctccacctgggcatggtggacaacaccttcgtcaagcgccagatagacgcctatatgtatgacgccagcatcaagacggcggtggtcatcaatgatccggatgacttcctgcgggagttcggcgatgaccctatgcacgccctcaccgccggatacgagcggatggggacggagaaccagaacatcatggtctttctttacaccgataaacgcttgggcaacgtctaccaggtcgcccagttcgacccccaggggaagaacgtcaacgatattcagatcggctgccccaatgtggccgagctgcgcaacctgctcacctatctgcgggtgcgccacggcttgcggatgtcccttcgggatttgacgcccaacgccctggccttgcgccaggccatgtctctcagcgagcaggaggtgcgcatcaaggatctatacacccgcctgcggacctttggcgatcggcagcctctgacaccggcagcctgctatgagctgttgggcgtgaaacagcctaccccagccaaggaacagctggcatcgctcatcgggatgcagtccctgaaggatgctttggctcagtttgacaccggtgacgccgaccaggctggcgcactggcctacttgactgcctcccgcctccagcctgacctgccccatcccaagcccaaggaggagatgatccacttccttctcaccggcaaccccggcactggcaagaacaccaccgcccacctcatcggacagctattctacgagatgggctatctggagactggacatgtggtggagactgaccgttcccagctggtgagcaaccatgtgggcgagagcgccctgtggacccgacagaaggtgcaggaggccatgggcggtgtgctgttcatcgacgaagcctataccctcaagcgcaatcgcgacagcggcaacgactttggccaggaggtcattgacacgctggtgaagctgatggatcaatacaaaggcaaattcatcttagttgcggcaggctaccccagggagatggagctgtttgagaagtccaaccccggtctggccggacggttccgccacctgcacatcagcgactacactccggcggagatggaacagatcgtggccttccacacacggaagaacaacgccgtcctctctgacgaactccaggcagcactgcccaacttctgtgagaactgggtgaacctggcgggcacggagtggaacaacgctagagaagcggtgaacctgctggatgaaatgctgcggaactggaaacaggatccggaagcccagtcggtgaccgatgagacgggggtcacccacgccctcctggaaccacgccacattccggaagccctgtccggcaacctgaaaccggtggcggagatgcaggcggaagcgctgaaccggcttaacagcctgaccggtctcaatggcgtgaaggcgaccgtagagcggcttcgccgccggatgctggcaggcgatcagaaggagccgggacactacctgttcaccggcaaccccggcacaggcaagaccaccgtggcacggtacatggggcagatcctgcgcaacctggggatgctgaagcgggggcacctggtggagttcaccgcttcggaattgatgtcccaggtgttcaacgaggagcatcagggggacttctatgagacggtgaggcacgccatggatggagtgctgttcattgatgaggcctatcagctgaccaccgacaccaccggccgtggccgtcccatcctggatgcgctgctgccctttatggagaacaatcgcaacaatctctgcgtcatcgtagcaggctatgaggacgagatggacgacttcttgaagtacaattccggcttccagagccggttcaccgagagcgtacactttgacaactac

SEQ ID NO: 404 - DNA, 2076 bp, Unknown
  Unknown gut bacteria
atggctgattataacaagaccatcaatctgcccaagaccgacttccctatgcgtgccaagctggcacagcgggaaccggggatgctggaagaaatgaatcgcaaggatctgtaccgtaaggtgatggaacggaacaaggataagactccgtttatcctccacgatggccctccctatgccaacggggatattcacattggcaccgccatgaataagatcctcaaggatatgatcatccgctacaagaatatgaccggccactatgcgccttatgttcctggctgggacacccacggtatgcccatcgagaccgccattcagaagaagggcgtcaagcgcaacaccatgtccgtgccagaattccgggacaagtgccggaactttgccctggatttcctcaaccgtcagcgggaacagttccgccgcctggggggcattggcgattgggagcatccctacatcaccctgaagcctgaatttgaagccaagcagatcaaggtattcggcgcaatggcagaaaaaggctatatctaccaggggctcaagcccgtctactggtgccccacctgcgagaccgctctggcagaagctgaggtggaatatgctgatgaccccgtcaccaccatttacgtcaagttcaaggttcatgatgacaagggcaagctggcacagtacggcgatctggacaagatgtacttcgtcatctggacgaccaccacctggactctgcccggcaacatggccatctgcctcaatccccagttggagtactctctggtcaagaccaatggcgagatcctcatcatggccaccgatctggtggacagcgtcatgaaggattccggcatcactgagtatgagacggtaggcaccctgtttggggacgagttcgaatacatgaccgcctatcatccctttatgaatcgggattccctcatcatccggggcgaccacgtcaccctggatgccggttccggctgcgttcacaccgctccctccttcggcctggacgacttctatgtgtgccagcgctatgacgagatccccaccggcgtggagatggaagtctccgtcaacgcacaggggttcctgaaccagtttgccggcccctatgaagggctgcatgtgaccaaggcacatccggtcatcttcaaggatctggtggacatgggtgccatcctgtccagtgcggatatcgttcatagctatccccactgctggcgctgcaagaagcccatcatcttccgtgccacccagcagtggttcgccagcgtggatgccatcaaggatgccgctgtggaagcctgcgacgacatcacttggaagcccgaatggggcaaggaacggatgatctccatgatccgcgaacgttccgattggtgtatctcccgtcagcgtacttggggcgtgcccatccccatcttcttctgcaaggactgcggcaagccctactgcacgccggaatccatcgaaaagatttctgagatcttcggcgctgaaggctccaacgcctggtgggcgaaggaagcggaggaactgatgccggaaggcgctgtctgcgaatgtggctgcaaggaattcaccaaggagaccgacatcatggacgtctggttcgattccggctccacctgggctgccgtctgcgaccacaatccggaacatcctgaactggtctatcccaccgacttgtacctggaaggcggcgaccagtatcgcggctggttccagtcctctatgctcacctctattgccgcccgtggtgtggcaccctataagcacatcatcacccacggctggaccgttgacggccagggcaaggccatgcacaagtccttgggcaacaccgtcgccccgcaggacatcatcaaggactacggcgctgacatcctccgtctgtgggtctcctccagcgactacactcaggatatgcgcatctccaagcccatcctgaagcagctgtctgacgcctacctgaagatccgcaacacctgccgttatatcctgggcaacctgaccgggttcgacctggctgccgacctggtggagtacaaggatctgatggaactggatcagtgg

SEQ ID NO: 405 - DNA, 939 bp, Unknown
  Unknown gut bacteria
atgaaataccttttgaaaaaagtattcactctcattattacattgtttatcgtttcccttctcgccttccttgcgtttcaggtgatctcggatccggccactgccattttaggcaccagcgccaccccggaatctctggcggcgctgcgggaggagatggggctgaaccgtcccatttttgtccaatacggaagctggcttttgggcttcctccaaggggattttggcacgtcctacagctaccatataccagtagcggaaatgatcgcccaaaagctccccatcaccgccatgctcaccctgttctccttcctgctcatgatcctggtgtccatccctttgggcatctggacggcacggaaagagggcggcctgctggatcggagcctgacggtcatcaaccaaatctttatgtccgtcccgcccttcctcttgggcgtggcctgtacttatatcttcggcgtaggtctgcgcatctttgtccccggacagttcgtgtcctatacccagtcctggccgaaattcctagtctacctcatcttcccagccatctccattggcatctcacggatcgccatgacggtgaaaatgctccgtgcctccatcctgaaccagatggagcgggactacgttcgcactgcccggagtcgggggagtacgaaggatcgcatcctgagaaaacacgtcctgcgcaatgccatcatcccagtcatcacgttcattgcaacgtccatggcggagatcgtggccagcagcatcgtcatcgagcaggtctttgccatccctggcattggcgtcctcctgctctcgtccatcaacaaccgtgacttcccggtggtgcaagccctggtgatgatcctggttctctgggtggttctggtgaacttcctggccgacctgctctaccagtacatggatccccgtattcggttacgctga

SEQ ID NO: 406 - DNA, 1599 bp, Unknown
  Unknown gut bacteria
aagaccaagaaggtcaacggcaagaacgtgaccatctatcagcccttcctgatggtctccggcctcctggtggacaacgataagatgtccaacgtggaagtcaccaacggcaaagtcatcaacagcggcgacaagaccgtggtcgtgggcatggcactgcctggcctggaggagagcttgggtctggctgatctgaccgacagcgacggcaagaagattgacattgatgtgcctcagaaggtcaccatcaaagcggatgtctccgacttctccctgctcaccaccgtcaccatggcgtccaacagcgcactggaagaactgaatctggacgatgtggactcggttgacgacctgaaggactccctgaaaaagctgggcgacagctccaaagagctggtggacggcaccaagaaactggaagacggcgtaggcgagctcaacgacaagagcggcgacctggccgatggcgtggacaaagtgaatcagggtgcaaaggatttggataagggtgccaaagacctgaacaacggcgcaaaggatttggatgacggcaccaacgagctggccacccaggtcaaggatctgcccagctctgcccagcagttgttggacggcgccaagagcatcaagtccgccctgggcaacgccgacagcaagacccagaccatctacaccggcgccgctgccatcgaggaaggcgcacagcagatgtccgataacctgaagaacaccaacggcaagagcatctacgaagccgcagctggcatccaggaaggtgccgcaaaggtcaccagtggcgcagcaaagctgtctgacgggctgaacaccgcagcagctaacttggatgaatccatcaagctgctgaacgccgcagtgggtcagctggaagatttgcagaagactacggaagacaccacaacgctgcaaacctatggcgcgctcatcaaagagatcaagggcagcatccagtatcagcagggcgtgaagcaggcactcacaagcaccttacagtctggtatcaccagcatcaaggggggcgcaaccctcatcgacacctacgccggtaagatcgccgatggctctgtgaagctggtggaaggcgcagcaaagctggaggctggcgcaaaggccatccagagcggcgtagacactatgatctccggcaacaacggccagaacctgaacgctatgatcgccggcctgagcatgctgagccagcagagtggcaagctggtggctggcactcagaagttggcggacggctccggtaaactgctggcaggtaccgataccctgaccgaaggcaccggcaagctggcaagcggcaccggcgaactgtctgatggtaccgacaagctcatcagcggcatcggcgagctgctggacggctccaaggatctggcggaaggcatggccaagttcgatgaggaaggcatccagaagctgaccagcctcactgacggcgacttgggcgacatcgtagatcgcctggaggcggtgcaggactatgccgaggaatacaagtcttacggcggctgccctgctggcctggagtgcagcaccaagttcatctacaagaccgattccatcggggaatga

SEQ ID NO: 407 - DNA, 1851 bp, Unknown
  Unknown gut bacteria
atgattgacgcaaagctagagcgcattttgttgcgcgtacaaaagcccgcccgctacaccggcggggaatacaacgagatcatcaaggataaggcagcggtagatgtgcgctttgccatgtgctttccggacacttacgaaattggaatgtccaacctgggactgcgcatcctctatggctccatgaaccaggcggagggcgtctggtgtgagcgtgcctttgctccctggggggacatggaggaggagatgcgcaaagaacatatccccctctacgccctggagagcggcgacagcctaaaaaacttcgattttgtgggcttttccctgggctacgagatggcctataccaacgtgctgaatatgctggatctggctcacatcccccttcacagcgaccagcggggggaggacgatcccatcatcgtggccggcggcacctgcgtgtacaacggggagccgttggcggacttcatcgacattttctccttgggtgaaggggaggacgtgaccctggagatgatcgacctgtaccggaaggggaagcaggctggttggagccgggcggagtttttgcaaaatgccgcccaggtgcctggcctgtatgtacccagcctgtatgaaatttcctaccaccaggacggcaccgttcaggccatcacccccacccacggtgcgccggagcacatccgcaagcgcatcgtggcagacctggacaagtcctatttccccgtcaagaccatcatcccctccaccgacatcgtccacgaccgggtgatgctggaggtgttccgaggctgtatccgaggttgtcgattctgccaagctgggtattgctaccgtccggtgcggcccaagagcgtagacctgctggtgcagcagggcatcgcatcctgcaaggactccggctaccaggagatgaccctctccagcctgtccaccagcgactaccgccccctgaccgagctgtgcgatggcctgttggagtactgcgacccccgcaacatcaacatcaacctgccctcccttcgggcggacgggttttccatgggcatcatgcagcggctgcagcgggtgcgcaagaccagcatcacctttgcccccgaggcgggcactcagcggatgcgggacaccatcaacaagaacgtcaaggaagaagatttattacagtcctgccgcaccgccttcgagggcggctgcaatgcggtgaagctgtatttcatgctgggtttgcccaccgagacggatgaggacgtcatcggcatcgcccgactggcggagaaggtgtactggacgtggaaaaattacgccgtcaacaagagccgcggcctgcgcattaccgtctccacctccttctttgtgcccaagccctttacgccattccaatgggaggcgcaaattacgagagatgagtaccaccggcgggtggacttgctgcgaggctccatcaaaaacaagtccatccagtacaactggcacgagatggagaccagctacatcgaagcagtgctggctcgtggcgaccggcggctggggaagctgctggaaacggtctggcgcaagggcgggcggctggactcttggagcgagtatttctccttcgagcgctggatggaagcctttgccgagaccggcatcgacccagatttctacgccctgcgggagcgccccaaggacgaaatcttgccctggagcatgatcgacattggcgttcacccggaatacctgtggcgggaacgggagcaggcatatcgctcggtcatcaccccggactgtcgggtgcagtgcatgggctgcggtgccaactgcctgctgccggacggcgtgttctgtgacgaagatcggaggtaa

SEQ ID NO: 408 - DNA, 1632 bp, Unknown
  Unknown gut bacteria
atgagcaagaagcaaaaaagggtgctctatcgcctcatcctcgctgctgtcctcctggtggcggcatccctgctgccagtgactggtgtttggaagtttttgtgcttcctggtgccctattttatcattggctatgacgttctgctgggcgctctccatggcatcgtcaacgggcagatctttgacgagaacttcctcatggccatcgccactgtaggcgctatgggcgtgggggactacaaagagagcgtggccgttctgctgttctaccagctaggcgagctgttccagagctttgccgtgggcaagagccgtcagagcattacccagctgatggacatccatccggagtacgccaacgtgaccgatgagaacggtcagttggcgcaggtggatccggaagaagtggaagtggggacggagatcaccgtgctgcctggggagcgcatccccatcgacggggtcatcctcacgggcacctctaccctgaacaccagcgcactcaccggtgagagtctgccccgttcggcagtgccgggggatgcggtcatcagtggctgcgtgaatttggatggtgtgctggtcatccaaaccaccaagctgtatgaggactccaccgtagctcgtatcttggagctgacggagaattccgccatgaagaaagctagggcggaacggttcatcacccgttttgcccactactataccccgatcgtctgtatctctgccttggtgctggccatcctgccgccggtcatccggttggccatggggttcagcggggaatggggcacatggatctatcgtgccctgaccttcctggtcatcagctgtccctgcgctctggtcatctccattccgctgaccttcttcggcggcattggcggtgcttcccgtcacggcatcctggtcaagggtgccaacgacctggagactttggccggtacccgctgcatggtctttgacaagaccggcactctgactcagggcgtgttctcggtcaccgaagtccatccggcagaggggtgggacaaggaacaagttttgcgcctggctgcgctggcggagcagttctccaaccatcccatcagccgcagcatccaggcagcttgcactgatgacctgaccggcgtggaagtgacggatgtccaagagcgtggcggtcacggcatcaccgctcaggcggatgggcacaccatcgccgccggtaatcagcggctgatggatgcgctgaacatcgctgtgccttctgacctgaatctgaatggtaccactgttttggtggcctgtgacggcgtgtatgtgggcgtcatcctggtggccgaccaggtgaaggcaggtgcgaaggaagcgctggccaagctgaaggcagtgggcgtgggcaagaccgtcatgctcaccggcgacggggatgctccggctgccgctgtggccaaggagctgggtgtggacgagtaccacagcaagctgctgccggcggacaaagtgacgctgctagaacagctgttggagcaggaacgtccggtggcctttgtaggcgacggcgtaaacgacgcaccggtgctcacccgtgcggatgtgggtatcgctatgggcgcgatgggctcggacgccgccattgaagcggcggac

SEQ ID NO: 409 - DNA, 1593 bp, Unknown
  Unknown gut bacteria
tgccaggtgagctatcaggattccactggcacctacaacggctatatgcgggaagaacacgtggacaccgataacaccgatgccgctgatctgaccggtgtggtcaagaccaagaaaaagtatatcaacatccgttccgctaagagcgctgatgccgaggtggtctgcaaggtgcccgccggcaagagcgtgtccatcatcggtgcgctggatgaggagggttggtaccaggtcagctacaagaatgacaagggtacccataagggctacatgatggctcagtatatctccatccccagcatctcctctggcaccatcggcacctccagcgccgttctccgctctgcggcggacagcagttccgatatgttctgtgtcatccccgaaggcaacaaagtctccgtcctggatgccctgggcgactggtatcaggtagaatacaacgaccaggtgggctatgtggacgcaagctgcgtggaatccgaagccctgagcaagagcaagggctatggcaccatctctgttgacaccctcaacgtccgtgccaagcggaacaccgagtccaacgtggtcaccaagatgagcaagggcactaccttccgcatcaccagcgtcaaggacggctggtatggcgtgacctacaacggtgtggacggctatgcaaaggcagaatatgtcaccgctaccgacaccattgacgctggttatatccaggtcacttctcagaccttgaagctgcgctccggcgccggcactgactatgaccagctggccatcgtgccttatggcactgtcctgaacatccgcggctctctgggcagctggtatcaggtgaagtataacggcaaggaaggctatgtgtgcggtgattacacctccgccaccacctccggcggttataaggcttatcccgatttcgccaaggtcactgcttctgctctgggtctgcgtgcaaagcccggcaccgacagcgacaagaccttcaccatccccaacggcactgtggtgtccgtccgcgggatgcaggatggctggtataaggtcgttgtctacggcacccatactggttatatcgatccggcttacaccgagcgcagctccggtccggctaccgtgcctcaggtcaccacgaccaccactggtacgactggcaccacgaccaccggcaccaccggcaccaccggttcctccaccacttccagtgcatcctctagttcctccagcagcacctcctccggttcctccggcggcggcagcggcgcggcagtcctggcctatggacagcggttcgtgggcaacccctacaagtggggcggcaccagcctgaccaacggcgctgactgctccggcttcgttcagagcgtctacgcacacttcggaaagagcctgcctcatagctcctacgcagacgcacatgtaggccgcggggtcagcaagtccgatatgcgtcctggtgacatcgttgtttacggcggtcatgtgggcatctacgccggcggcggcaagctgctgagcgcactgggcaagaagtatggcatcacctattgcagcgtcaactacaagcccattcaggcggtacgccgtctgttctaa

SEQ ID NO: 410 - DNA, 1482 bp, Unknown
  Unknown gut bacteria
atgatgcacaagaatcgaaacaaaccggtttatttgttcagcagctcccccagcaaccgcggggaggaactgaaacgccgtaccaaacgcgcaaaccagcgcactgtgacctttttcctggtctttctctacctgttcactctgatctcctttatcattcccctgcgccccacctattcggatctggaacagcggaacctgactaagttccccacccccaccctggccaccatcagcaacggggagttcttcgagggggtcaacacctggtttgccgaccccttccccttccgggagcagtttttgaagctggaaacaggcgtcaccggcctgtacggcgtcaaaacctcccaggtggtgggcgatgtgaagcagggggacgacattcccgatgcccccatgacgccggatgacagcgacagctccgctgacgcctctggcgatgcgtcctcctccggtggtgcttcttcctctggcgatgccagcgcttccacgcctgctgacagcaatcagaccaagcccaaggatgacgaaagtgacgccacgatcccagagttggataagaacgccaaatccgaaaccctgggcgccgtactggtcattgatgacgcagcctatgaatacttcaatttcgatcagaaggccgccaacagctatatcaagatgatgaacaaggctgccaagaaactcaaaggcaaagccaacttgtatgacctgatcgtacccaccagcatggatgtgtgcgtgccggactccgtccggaaaggcttgaacacctccagccaagagaaagccatcgagtatatctttggcagcatgggcgatggagttcattccatcaaggtgctggacaccctcatcaagcacaatgccgatggcgagtatgtctacttccgcaccgaccatcattggacggctctgggcgcttatcacgcttatgaacgcttctgcgaagcctccggccagacagcagcttctctggacagctttaagaaggtgacctacaagaacttccacggctccttctatcgggacactaagtccaccgccctaaagaatcatccagataagattgtcgcctatattccgccctccaccaacgacatctccatcaccaatatggacggctccaagatggattggaatatcatcaccgacgtgagcacctggaactccaccgccaagtattccaccttcatcggcagtgacaaccccttcagtgtggtcaagaatcccaaggtgaagaatggcaaatccgtcatgctcatcaaggagtccttcggcaacgcctttgcccccttcctggtggagaactacgagaatgtctacatcgtggactatcgctacatcaagaatgtagataagcgttctctgacccagatggtggacaaatacaagattgatgacgtcctctttgtcaacaacgtcagcgctgtccgcaacgaaagcgccgtgaagctgatgtccgactttgtgggctga

SEQ ID NO: 411 - DNA, 1137 bp, Unknown
  Unknown gut bacteria
atgaacatgaccgagcgcagaaagcgcattctccgtgcggtagtggagcattacattgaaacggccgaaccggtaggttccaagatcatcgctgaccttgcccagttggattgttcctctgccaccatccgaaacgagatggcgaccctggagaagatggggtatctggaacagccccacacctccgccggacgcatcccctcccctgctggctaccggttctatgtgaacgagctgatggaaaagcacaagctgtccatgcaggagacggaacggatcaacgaggcgatgcatttgaagatgcgagagttggatcgggtcattgaccaagccggcaagctggtcagccagttcaccaactaccctgccttcgccctcaccgccggtcgggatcgcatctatatctctcggtacgacctgctgatggtggatcccaacagctttatcgtggtggccatgactaacaccaatgtggtcaaaaacaagctggtgcatctgcccagcaacatcacagagccacagctccagctgctcaacgcattgctgaacacctccttcactggcaagacactacaggaaattacgccggacttgatgcaggtggcagaaaaggcggcaggcagttcctacgggctgatctccctggtggtttccttcgccatggaggtgctggatgacctggaacacagcagcatccacaccgcaggagccagtcagctcctgaatcacccggaataccaggacgtagacaaagcgcataagctgctgacttatctgtccgatgacccaaatttggctcacctaaccgctcccatgatgaatgagggcaaggatgaggggccaaaggtgttcatcggaccagagaatgtggcagaagagttgaaggacaccagcgtggtgctggccagctacgacatcggcgacggcatgaaaggcgtcatcggtgtggtggggcccacccgaatggactacgccaaggtgaccgccaagctgtcctatctggcggataacctgggcaagctgttcaatggaatgtccggcaacgccctggctccccctgcgcagaaggcattggagctgaatccgccctctgagcttgacccaagtaaaaacgactccaacgatcaaggaggctga

SEQ ID NO: 412 - DNA, 1359 bp, Unknown
  Unknown gut bacteria
atgacagtaaaagaattgatcgcacgatccaaggccgcacaggaagcgtttgcctttgcaacgcaggaacaggcagatgcagctgcaagagccatctgcaaggtcgtatatgacaacgctgaaaagctgggccccatggccgcagaagaatcccgtatgggcagcgaacaggacaagattgcaaaatgccgcaataagtccgcactgatctgggagagcctgaaggacaagaagtcctgcgacatcatcaaccggattgaagaacgccgcatgatcgaagtggcaaagcctgttggcgtggtcgcttccatcatcccctccaccaaccccgtcgtcacccccatgagcaacggcgcatttgcactgaagtgccgcaactctgtcatctttgctccccatccccgcgcagtcaagtgtaccaagctgctggtggagatgttccgcgcagagctgaagaagctgggtctgccggaagatctggtgctgggcctggaagaagtctccaacgacctgacctccgaactgatgagcgccgctgacatggtggttgctaccggcggcatgggcatggtcaaggcagcttactcctccggcaagcccgccatcggtgttggccagggcaacgtccagtgcatcatcgatgaagatgctgacatcgctgacgctgttggcaagatcatcatcggccgcgcattcgacaacggcctgatctgcctgggcgaacagaccgtgttcgtacccgaagataaggaagcagagtttgtcgctgagatgaagaagcagggcggctatctggtggaaggcgaagaaaacgtggacaagctgcgggaaggtctgttccccggcggcgatgcattcagccgtgtggtcgttggtatgttcgcagaccaggtttccgatgagatcggcctgggcgcacccaagggcacccgcgttctgttcgccaaggccaaggctttgggcgcaggggatgtgctgtgccgcgaaaagctctgcccggtcatcgcttacatgacctacaagaccttcaaggaaggcgttgccatgatggaagccaacctggagcacgaaggcaagggccacagcatcgctgtccactccaacacccccgaaaacgtggaatacgccgccatccgctgctgcgtttcccgtgtggttgtcaatcagccctccggcaccaccggcggcggcagccccaccaacggcttcacccccaccaccacgctgggctgcggcacctggggcaacaacagcttcgctggtaatctgaactacgaacagttcatcaacatcacccgcgttggctatccctacgatgaatcctatctgcccgataccgctaaggctttcgaagactga

SEQ ID NO: 413 - DNA, 1629 bp, Unknown
  Unknown gut bacteria
gcctgccgcgccctctttggcggcatccgcttcagctccctgcggctcatcgtccgctgtccccaggtgcagggcggcagctggactggggtcaccctgacccaccggtacaagctggaatctgaccggcaggagtatttcttccccctgaaaaagctgaaatgggacaaagaccactacatcgccatcgccagcgtccccctaaagcagttcgccttctcccccctctattgggacatccgcatgacctttgaaaaggacggcgtccagtactggagctcggtgaaagcccccttccgctccacccagcactattggaaggatctggcctggaacgtaggcatcaagggtctgttcttcggggacagtctccgcctggacaaggacaaccagctctttctctaccgcacggtgggcaaccggttcgccctggtctatcaggagtactccccctacaccggcttccgcttccgctgcaaggaacggctggccatggctctgtactacctgcggcggaaatctctgctgaagcagagcatctacctgacgtacgaaaaatactgctgtatggcgcaggacaacgggttctacttcttccaatactgcatggagcacaacatggagcaggtcatgaatcggaagatctatttcatcatggacaaaaaggccaccgactaccaaaacctcctgccctatcgggatcacgtcatccagttcatgagcctcaagcacatgatctacatcctggccgcccgcctgctcatctccagcgactccaaagcccacgcctacgcctggcgtgccaaggagagcgtcatcctgccccaggtgaccaaaaataagcggctggtgttcctccagcacggggtcatcgccctgaaacgggtggagttctcccgctccggcaccaacagcgtcaacctgttcatcacctccaatcagcgggagcatgacatcatcatcaacgagctgggctacctgccggaggaagtggtcatcaccggcctggctcgctgggatgtgctccgagacaaatccgcccagcaggaaaagacccacatcctggtcatgcccacctggcggaattggttggaggaagtctccgatgagactttcgtggccagcgactactatcgcaactatatggcgttgctcaactcccatcggctggctcaattcctggaacagtacgacgtgtacctggacttctacatccacccgaaatttcgggagtacatcaagaacttctccatctccggcgaccgagtggcgctcatccccttcggctcccagcccctgaacgagctgatgatggagtgcaagctgctggtcaccgactattccagcgtctgctgggacgtgtactaccagggcaaaccggtcatcttctaccagttcgacctggaacagtacaacgagacccaaggctcctacatcgacatggagaccgagctgttcggcgaccgtgccacggaaccagagcagctgttcgccctgttggaggagacggcagccaacgggttccagctgaaggagaaatacgcccagatgcgggaaagtatgtacgcataccttgaccacaataatagtcagagaacttgtgacgagatccaaaaacgaaattggtga

SEQ ID NO: 414 - DNA, 1188 bp, Unknown
  Unknown gut bacteria
gtgaatcaggctttaaatcgtctgttacaagagaacaaaaccgccttttatgtctttgatatagcgaaactgaaagcccgcatcgcccacttgcaggcggcactgccgccggaggtggtgctgtgctacgcggtgaaggccaacaccttcatcaccaaggagctcatcgacactatccaccgctttgaagtttgctcccccggcgaggcggagatctgccgtgcagtgggggtgcccagcgagaacatggtcatctccggcgtgtataagacgccggaggtcatggaggccatggtagctgacctcgatttcagccccatctatacggtggagtctttggagcagtacgagctgttccggcggctggcgcagcagtatgaccgcaccctgcccctgctgctgcggctgaccaatgggagtcagtttggcatcaacaagggggacatcgaagccatcgtcgcccggagagaggagacgccggaggttgatttattgggcatccagttcttctccggcacccaaaagacctctctgaaaaagctgaaacgggaggtggggaagctggacgacctgctgaccctgctggaagaaaaatatgggtttgttgcccaggagctggagtacggccctggctttccggtgaactacttccagtcggatgagctagacgaggcggaactgctggctggcttctcggagctgctgcacgacatgacccaccaccccaagatcaccttggagctggggcgcagcatcgccgcttcctgcggcacctactacacccacattgtggacttgaagcggaaccaggagcagaactacgccctggtggacggcgggatgcaccacctggtgtatttcggccagcacatggccatgaagcagccctttttccatgtgtgcggcaaggagcatctgccggccacagatcagtggaacctctgcggatccctgtgcagcatgaacgatgtgatgaccaagcaaagcccgctgcccgacttggcgctgggcgacgtgctcgcttttgaaaacgccggagcctattgcatgaccgagggcatctccttgttcctcagccgtgacattccggcggtctacctgctgttggaaaacggcactgccgcccaagtgcggaaggcatttgatacggccaccttgaatcaaccaaattacggaaaggatgtatga

SEQ ID NO: 415 - DNA, 1188 bp, Unknown
  Unknown gut bacteria
atgaaaacaccctttgtaaccaaagatcagctggaggcgatctgccagcaatatcccacccccttccacctctacgatgaagctggcatccgccagaccgcgcgggaagtgaaccaggcgtttgcctggaacccgggctttcgggaatatttcgccgtcaaggccacaccgacccccggcatcctcaaggtgctgaaagaagaaggctgcggtgtggactgctcctcgctgaccgagctgatcatgagcgacaagtgcggtttcaccggccacgagatcatgttctcctccaatgagactccggcggaagaatatgtccaggcggacaagcagaacgccatcatcaacctggatgacttcacccacatcgacttcctgaaagagaccatcggttatatccccgaaaccatctcctgccgctacaatcctggcggcgtgttcaccctgggggagagcgaagaaggcttccaggttatggataaccccggcgaggccaagtacggcttcaccaaggaacagatcatcgagggctacaagaagctcaagtccatgggcgcaaaatatttcggcatccacgccttcctggcctccaacaccatttccgacgactactatcccaccctggctggtgaactgttcgagctggcggtggaactgaaggaaaagacaggctgccacatcaagttcatcaacctgtccggcggcgtgggcgtcccctatcgtccggagcagcgcaagaacgacatcgcagccatcggcgctggcgtcaaggaacagtatgagaagatcctggtgcctgccggcatggatgacgtgagcatctacaccgagatgggtcgtttcatgctggcgccccacggcctgctggtcacccgtgccatccatgaaaagcacatttataaggaatacattggcgtggacgcctgcgcagccaacctgatgcgtccggcgatctatggcgcataccatcatattacggtcatgggcaaggaaacagaaccttgtgaccacaagtacgatgtggtcggttccctgtgcgagaacagcgataagtttgccatcgaccggatgctgcccaagatcgacaggggcgacctgctggttatccacgacaccggcgcccacggcttcgccatggggtataactacaacggtcgtctgcgcagcgcagagatcttgctgaaggag

SEQ ID NO: 416 - DNA, 741 bp, Unknown
  Unknown gut bacteria
atgaagatatggggtctcaccgaccggggaacggtcagagagcaaaatcaagacaccttccacctctggaaggaggacaacacagccgccctcctggtctgcgatggaatgggcggtgcacgggcaggcaatgtggccagcgccctggcggcacaggcgttcacggaagccatccagcacagcgatgcccagccagatcagcggctgaccgcagccctggcacaggccaacgagcaggtgtaccagcgtgcccatcgtgatccggactgccgagggatggggacaacgctggtggctgcactggtagagggcaacctggctcacatcatcaacgtgggcgacagccgtgcctactacctgtcccaggacggcatccggcagatcaccatcgaccactccctggtacaggatctgctccaacgggggcacatcaccccagaagaagccaggaaccatcccaacaaaaacgtcattacccgtgcgttgggagtggacaacaagctggaaggggatctgttcacccaggagctggagccgggcagtatgctgctgctgtgcagtgatggcctgagcaacgtgctggaggatgaggaactgttggaggtggcactccacggcggtacgccggaggaaggctgtcaacggctcattgggcttgcgctggaacggggcgcaacggacaacgtaaccgcagtgcttttggcgtgggacgcgccggaggcaaaggaatctgaggagtaa

SEQ ID NO: 417 - DNA, 1215 bp, Unknown
  Unknown gut bacteria
gccaatatggcgcagaagtatgagaaggtcaacggcgtggtggactatgccgaagccctggtgggccccaaatacggctactacatgggctggttcatgaccaccatctactacccctccatgacctcggttctggcttggctcagcgctcgatataccctggtgttcatcaactctgtcaatccggattttaccatgattatccccgcctctgagggcggctgtatcatcggcccggaatgtatggccatgaccatgttcttcctctgttgcgcctacaccatcaacgccctgtcccccaagctggcaggcaagatccagaccacaaccaccgtcatcaagctcatcccgctggctctgatggcagtggtcggcatcatctatggcctgatgaatgggatgaccgctgcgaactttacgacgatggcaaatgtaggcgacgccgcctccggcaatcccttgctggccgctgtctgcgccacctccttcgcctatgagggctggatcatcgccaccgccatcaacgcagagctgaaggattccaaaaagaacctgcctcgtgccttggtcatcggcggtatcatcatcatcgccgtctacatcgcctattacgttggtgtcgccggcggcgctaccaaccaggagctgatcgacaacggtgcgactgtggcctttgtcaacatcttcggcaacgtcctgggcaacatcctgaatctgttcatcgccatctcctgcatgggcaccatgaacggtctcatgctgggctgctgccgtggtatgtactccgtggccgcccgaaaggaaggcccttgccccgatgtgttcagtcaggtggataaggcgaccaacctgcccaataattccgctgtcctgggtttgttcgtctgcgccgcttgggggctgtacttcttcctggccaacctggccaactcccccctggtgggcaagttcgtctttgactcctccgagatccccatcgtcaccatctatgccatgtacctgcccatctttgtcatgtggatgaagaaggcgaaggacgagaacattggcagacggtttatcatccccatcctggccttctgcggcgcagcttttatggtctacgcctgcatcatcggtcataagttcgccaatgtctactatctgatcgtctttgcggtcatcatggccatcggcggcatcttccggaagaacaagaagggggctgcggtgtga

SEQ ID NO: 418 - DNA, 1605 bp, Unknown
  Unknown gut bacteria
atgtctgaaaacaagcaacgcaaagataccttttttggcggcgcagccattttggccgctggcattatcgtggtgaaggtcatcagcgccgtctacaagatgcccctggtcaacatcctgggcagcagcggctatgcggacttcaccgccgccttcaatatttttaacatcctcctgaccgtctccactgccggcattccggtggccatgtccaagatgatctccgaggccaacgcctcccacaggcataagcagacccacaagatctttcgggtctccctgttcttcttcggcgcagtgggcatcttctgctccttggtcatgttcttcggcgccaacttcttcgccggcatcatgaatgacaccaaagcagccgaatgtatgcgggtgctggcgccatcggtggcgctggtgtctggactgtcggtgttccgtgggtacgcccaggggtacagcaacatgaccccctcatcggtgtctcagatcatcgaggcgctgttcaagctcatcgtcggcttgaccctggcctggtacttcatccgggtgctggggaagccggactacattggcgcagcaggcgccatcgctggcgtcaccgtctccgagcttgccgctctgctctatatggcctgggactatctgcgcacccagcgccacaccccttcgccggcgccttcggagcggccggacagcgccaagcggatcctgaaaacctgtctgctgctggctatccctatcaccatcaccgccgcctccacctccatcatgaccgctgtggacaacgccctggtgctgggtcggctgcaaaacgccggactgctgctcagcgaggatgccgcccgaagcctgatgggcaactacactggggtgcagacagtctatcagatccctgccgccctgatggtagccatcaccgcctccgtcatccccgccgtgaccatctgcttcacccagaaggatcggacgggcgcggccaagatcgttggctcctcactgaaaactgccgctctgctggccttcccctccggcatcgggatgctggtgctgggcaagcgcatcgtacagctgctcttccccagcctggacgcagacatcgccggcaccattctgtccatcctgggcatcgccaacatcttcgtctgcctcatgctggtggcaacttctgtactgcaagcctataacatcctctccctgcccattttcaccatgctggcagggggcgtggtcatggtgctctttgactacttcatggtaggcacggtgcaattcaacatctacggctccccggtaggcacctgcctgtgcttcggtctgacctgcgggctggatctgcacctggtgcgccgtgtggttcccggctgccccaattatgcacagctctttggaaaaaccctggccgcctctatcatcatgggtgccgccgcttgggcggtgtacgggctgaccagccacctcattggcgtaaagctggccgtcctgctggccatcctgctggcggtggtgctgtatgctgtactgctggtactgctccaggtgctaaccaaggatgatctttccctgatgcccaagggagataagatcgcaaaattactgcacatcaactga

SEQ ID NO: 419 - DNA, 816 bp, Unknown
  Unknown gut bacteria
atgagcaagagagcatatactgtgctgccgccggacagagaggagaaggtgctggggatttttgtgagggacgcatccttctaccgcaccttcttccccctgctcttggtcatcgtcctccagcagctggcggcgctggcggtgaacttggcggacaacatcatgctggggcgctactccgagctggcattgtctggggcgtccctggtcaatcagctccagtttaccctccagcagatcgccgccggcatcggcatgggcatcgtggtgttagccgcccagtattgggggcagaagcggacggagcccatcaagaagatcatctccctgggggtcaagtgcggctttttcagcggcgtcctcttttttgccatctctcagctggctccggcgggagtgctggggctgttcaccagggatacggaggtcatcgcagaaggagtgcgctatctgaaggtcatctgctggacctatccggtgttcggcctgtccaactccctcatgtacgccctccagagcgtggagaccgccatgatcggcacggtcatgtcctgctccaccatctgcatcaacgtctgcctgaactactgtctcatctacggcaacttcggcgcgccggagctgggcatcgtaggtgctgccgtggccaccctggtcagccggttggtggagctgggcatcatcctggtgtatatcctgttccgcgacaaaaagctccacatgaagctgtgggagcttttgcggtgggacggcacctatttgccggattatttgaaggtctccacccccatcgtcatctccggcctgctctggggg

SEQ ID NO: 420 - DNA, 1194 bp, Unknown
  Unknown gut bacteria
atgaagaaaaaactgctgatcttaggcgctggtatttatcaggtgccgctgatcgagacagccaagcggatgggcttggagaccatcgtggccagcatccccggcaactatccaggctttgcgctggcagacaaagtggtctatgagaacacggtggacaaggaagccatgctggcgctggccaaggcagagcaggtggctggggtctgcgtgtgcggcaccgatgtttgcgtacctgcccaggggtatgtgtgcgaccagttggggctgaaaggccccagcgaggcggcggcagagcgtgcccaggataaggcgctgatgaaggcggcctttgagaagggcggcgtgcggacggcgcggttcatccatgtggatatggataacgctaacccagtggacgtttgtcaggagattggctatccggtcatcttcaagagtgtggactcctctggcagtcggggtatcacccgagtcaatggaccagaggacatcgcctacgcctatgaacaggtgaaggagaacacccatgctgaccactacctgatcgaggagtttctcgtgggtgaggagttcggcgcccaggcgtttgtgctggatggggaagtgcagtttatcctgccccacggagactatgtgttccagggggatactggggtgcccattgggcattttgccccctatgacatgggggcagacatcgtggcggatgcagaggaacagctgcgccgagcggtaaagagcctggaggtggacaactgcgccatcaatgcagacttcatcttgtgcaagggcaagacctatgtgctggagatcggcgcacgggcgggtgctacctgtctggtggagatgaccagcttgtactatggctatgactactatgagaagatcatccagtgcaacctgggggaaaagccagactttacgcctcaggcagcgcctcagcccaacgccgaaatgctgttccaggcgccggtgacggggaagatcacggagattgacttgagcggcgtgacgccggatccgcacatcatcaacctgtccatggattaccaggtgggtgatgctgtgcggcagttccgcaaggggccggatcgcatcggacagatcatcgccattggggacagtgtgtctcaggcaaaggaacggatcgaccgagcgatggcgcaggtgaagattaccatcgacccggaataa

SEQ ID NO: 421 - DNA, 1875 bp, Unknown
  Unknown gut bacteria
ggccgtaagagcgccgcagtccgcaacaccatctcatttatcatcacgggcggggctatggttctcatgttcctgctcatcaagccgatcatgatggatggcgaagtcattgcttattggctgggcgactgggcaccggtgtccggctgggccatcggtatcggcatcgaagtggacgcgctgagcctgttcttcggcctgatcgtcacggtcgccgtgtttgcctcctgcatctatgccttcacctatatggcacacgatgacagccaggccaactacttcagcctgttcctcatgctctccggctccgtgctgggtctggtgctctctggcgacttgttcaacatcttcgtcatgatcgagatcatgaccttctccgccgtggcgctgaccgcattccggaacgactatgaaggcgccatcgaaggtgcgttcaagtatctgaccgtcggctccctgggttccactgctgtcctggtggggattaccatcctctacaaccagctgcacaccctgaacctggctcagatctctgccatgctggcggaaaagggcaacacccccatcctgatggtggccttcggcctgctattcatcggcttcggcaccaaggcgttcatcttccccttccaccccctggcagccgatgcccacgctgtggcacctgcttccatctccctgatgatctccggcgtcctcaccaagtgcggcgtctatggcatcatccgtctggtctatgcgctgttccagaacatccaggttcccgcagtgcagtatctggtggtcggctttggcaccatcagtatgttcgtctgcgtcaccatggcgttcaatcagcataacttcaagcggctgctggccttccattccatctctcaggtgggctacgtcatcaccgctctgggtctgggcactgccctgggtctcagctccggcctgttccacgccatgaaccacaccctgttcaagggcctgctgttcctgactgctggcgctgtccagcacgccaccggcagcctggatctggataagctgggtggtctggcaaagaagatgccccgcacctgcatcctgttcctcatcggcgccgcttccatcagcggcctgccccccttcaacggctttgcctccaagtggtacatctaccaggcagcctttgaaaagggcgctgagagcaacaacttcttcttcatctttgtctgcatcgttgcgctgatcacctccgtgctgaccctggcttccttcatcaaggtctcccagagcgttttcttcggccagctcaaccccgaattcaaggatgcgaaagaagtttccctgggtatgcgcatccccatgtggattctggccgtcctgtgtatcctcaccggcctgctgcccggcaaagtcaccgattacctcctcgcacctgcaaccgccgcagcttccaacgctgtgaactatgtggataagatgatgggtgacggctacgcagccgctcacggcgtcaccaacaccctgggcgacaccgccatcaacttcgccggcacttgggatcccatcgtttggctgctcctgctgttctgcgtcacttgcgctgtggctctggtcgcaatcctgggctccaacaagaaggtcggcaccctggaaatgccggctgagatcgcacaggcagatcaggttgctccggctgacgccaagtatgaacccttcttctccggtgaagaaagcgtttattctcaggttggcggctccgacctgttctggggcttcaagcataacctgaaaaagtacttcagctatatgcatgactggcacagcggtatcgttaacgactacgctctgtacggcgtggtggcgatcgcctttgtcctggtcttctgcgtcgcgtttctgtaa

SEQ ID NO: 422 - DNA, 1485 bp, Unknown
  Unknown gut bacteria
aaccccgccaccgcctttgagacgaatgagatcttggccatctcggacgagaagctggaacagttttatcaggatgttccggcgctggagggctatcgccgtcacctggatgagatccgccgccgccgtgcccacatcctctctccggcggaggaacggctgctggccatggctggggagctgtctgacaatcccgacaatatcttctccatgctcaatgacgccgacctgacctttcctgacgccattgacgcccagggggcggcgcaccatgtgacccatggttcctatatccccatgatgtacggcgccgatcgcaccctgcgcaaatccgcgttcgagtccctgtacggggtctacgagcgccacaagaacaccctggccgccaccctggccgcccaggccaaacagctgtggttcttcgcccaggcacggaactatccctccgccctggccgctgccctggatcggacggaggtgccggagagcgtctatcacagcctgatcgacgcagtgcgggagaatctgcccaagctgcaccggtacaccagcctgcgcaagaagctgctgggggtggaggagctgcatttctacgacctgtacgccaatatggtgggggatgtggagatgaagttcacctttgcggaagccaaggagctggtgctcaaggcgctggcgcctttgagcgagaactatctgaacggtctgcgggcgggctttgaaggccggtggatcgacgtgtacgagaacgtgggcaagcgctctggcgcttacagctccggcgctcgcccccacccctttgtgctgctcaacttccagggcaccctcaacgatgtattcaccctggcacacgagatggggcacgctatgcactctgaaatgtccaacgtgaaccagccggtggtctattccgattacgttatctttgtagccgaggtggcttccacctgtaatgaagccctgctgatggaatacctgctcaaccacaccaccgacaagcgggaaaaggcttatctcatcaactacttcctggaacagttccgcaccaccctgtatcgtcagaccatgtttgcggaattcgagttgcagatcaatgagctggcacagcagggacagggcatcaccgccgaccggtgctgtgagatctatcggaagctcaacgaggactactttggcaaggacatcgtggtggatgaccagattgccctggagtgggcgcgcatccctcacttctactacaactactatgtctaccagtacgccaccggctacgccgctgccattgccatcagccgccgtatcctgaaggaaggccagccggctgtggacgattatttcaagttcctgtccggcggctgctccatgccgcccatcgagctgctgaagctggcgggcgtggatctgtccactccggcacccatccaccaggcgctggagctgtttgaccagctcatcgaccagttggatgagctgttggcggaataa

SEQ ID NO: 423 - DNA, 852 bp, Unknown
  Unknown gut bacteria
atgaagaggaataagctgttctccatcccctatatcatctggatggctctgtttgtagtagcgcccatcgtcctggtggtgctctacgccttcactgccgccgatggcggcttcacctttgccaacttcacccgaatgggcaattactttggggtctttgtccgcagcttctggctggcactcatcgccactgccatctgcctggtcattggctaccccatcgcctatctcatctccaaggagagcaagcggttccagcgcatcagcatggcgctgatcatgctgcccatgtggatgaacttcctgctgcgtacctacgcttggatgtccattttggagaataccggtctgctcaaccgcttttttagcgccattggcctcatcgacctggtcaacggcatcctgggcaccaacatgacccacttcaacatgatcaacaccccaggcgctgtggtgttgggcatggtgtataatttcctgcccttcatgatcctgcccatccactcggtcattcaaaaaattgaccggaacctcatcgaggccgcgcaggatctgggttccaacaactaccacgtctttaccaaagtcatcttcccgctgagcctgcctggcgtcctgtccggcatcaccatggtgttcgtgcctgccgtgagcacctttgccatctccaagctgctggggggcagcaaggatttattgctgggcgacctcatcgagattcaattcctaggctctgcctacaatccccatctgggctccgccatcagcctggtcatgatgctcattgttgtgatctgcatggcggtcatgaaccggttcggtgaaggggaagaaacggcggttatgctatga

SEQ ID NO: 424 - DNA, 729 bp, Unknown
  Unknown gut bacteria
ttgagtgcttggtttgcagaagtgcaacagaaatttattgcggactttatcgaaaaagaccgttggacttacatcactgacggcctgaagatcaccatcatcgtcaccctgctggcgttgatcgttggcctgatcctggggatcctcatcgccatggtgcgctgtacccacgaccagacccgcccgaagtggttccgttcgcccggcaacttcctgctgaagctggctgacgccatctgtcggctctacatcaccgttatccgcggcacgcccaccttggtgcagctgctgatcatcaacttcgtcatcctggtctccgcccagaaaatcaccgttgccgtcatcaccttcggcatcaactccggcgcctatgtggccgagatcatccgagggggcatcatgggcgtggacaagggacagatggaggctggacgctccctgggcatgagctatgtgaccaccatgaaggacatcatcctgccccaggccatgaaaagcgccctgcccgccctgatcaacgagatgatcaccctgctgaaagagacgtccatctgcggctacatcggcctgaatgagctgacccgcggcggcgacatcatccgtggtatcaccttcgatgcccttttccccctgttcactgtggcgctgatctatctcgtcatggtgctctttatccagtggatcatgggcaaagtggaaaggaggctgcgcagcagtgattatcgttaa

SEQ ID NO: 425 - DNA, 1218 bp, Unknown
  Unknown gut bacteria
atgaagcgaaaacccattgcactgttactgatcctctccatgctgctggccttgtccctgaccggctgcggcaaggacaccgccctgacggtctacgccgaaggcaatttcatccgtcaggatctcatcgacgccttcacggaggagacgggcatcgaggtcaactacattatcggcacccgctctccggcagagaccaaggccaagaccgatgatgccaacagcaccaagaccgattccagtgcggacgaagaagtggtgctgccggaagaatcctcggtggacgtcctgtccgaagttcgggcgtggaaggaggaggacacccaggcgcgggcggaaagctcggaatctgatggcgccgtctgcgattatgacgtgatcctcaccgaccaggacatcctctcccagctgaaggaggaggattgcctgatggagctggacaccaagaaggtgtccaactatgacaacatcgccaagaaatatcgcaagctcaacggagatggcgctctgtacggtatccccgccctgtggggcatcgccggcatcgtctgggacaccaagctggtggatacccaagtgagcagctgggacattttgtgggatgagacttacaagggcaaaatcgtcatgcccgctaccgcgcgggaatgtgccgctgtggcgctgaagcgccagggcaaggacgtgaacaccacggacaaaaaggagctggaggacgcctacaagctgctggatgaacagaaggatctggctgccggatacaccagccgagtggcctacaccatgatgaccaaccaatccgccgccctggctgtggctgactccggtgccgccattgacatgatgagcaacaatgcaaaccttgccttcgccctgcctgacgagggcagctggcgggtgtgctactcctattgtgtccccgctgggacggagtggccggaggaagcgcagaagttcatcaactatatgtgctccgccaacaacctggccaagaacgccgtgtacagcaaatactccaccacctctggggaagcgctgaagaagatgaaccagagctggcacgacaatccgctggcctatccggacgagaccatccgcaagcagtcccccttcctcaccggcctgcccgctgaaaccgagacccttcacggctccctgttcgcccagctcaccggcgcggacacagccgcagacaacaccaacaaccctcagtcctga

SEQ ID NO: 426 - DNA, 2283 bp, Unknown
  Unknown gut bacteria
atgctccgccgcgcgctgttccttcttaccgcgtgcggcattgcggcgtttgccgtattgatgctccagcttttccggctgcaaatcctgcgccacgacgagctggagagcgctgccttgcagcagcagctccgccgcacggcgatccccgcctcgcgcgggacgatctatgaccgcgaggggcgcgtgcttgcgatgagcgcgacaacgtataccgtgtacgtgagccccgcggagatatccatgaacggcgaggacgccgagcgcattgcgtccggtctttccgagatcctcggcgtagaccgcgaaaagatcctcacgatgaccgccgaccggcgcagctggtacaaaactgtcaagcgccagatcgaggaagccgaggcggacgcggtgcgcgcctttaaaaacgagtacgacctgcagggcgtgaagctcgagccggataccaagcgctattacccgtatgcttcgctcgcctcgcatgtcatcggcttcgtcggcgcggacaataccggcctttcgggactggagtttacgcagaacgagctcctgaccggaaccgccggaagcatcctccggctgaagaacagcgccggaacggatatgatcctcacaagctatgaggattacgtcgatgcgcaggacggactcaatctccacttgacaatcgataccaccgtccagtactatctggagaagcagctttcccaggcggtgcaggactttgatatacaaaacggcgccgccggcatcatcatggacccgaatacgggcgcaattttggcgatggcgtcgctcggaaactttgatctcaacaactaccagcgcgtctccgccgacatccaatcggagatcgattcgaccgccgatccggacaccgcggcggagatgttgaaagacgcgcagcgtgcccagtggcgcaacaaggcaatttccgatacctacgagccgggctccacatttaagatcatcacgcttgccatcgcgctcgaagagggcgttgccgcgccgtccgacagcttttactgcggcggcagcatgacggtgcagggacgcggcaagccgctcaagtgttggaaaacgatcggtcacggtccccagacacttacgcaggcggcgcagcattcatgcaacgtagcatttgccacgctggggctccgcatcggcgaggaaacgttctaccgctactgcgagagcttcggctttttccgcgcgagcgaaaatccggacgcttctctcacggggaagaccggcatttcgcttccgggcgagagcggcagcatctggtggccgcgcagcgtcttctgcaacagcgaaaacttttcgcagcttgcggcggcgtcgttcggccagacgttcaacatcacgccgctccagctcatcacggctgtgagcgcctgctgcaacggcgggtatcttatgaagccgtacatcgtcgattccgtcacggacggcaccggcgcgcttatatcgaaaaccgagccggaggtgctccggcaggtcatttccgagaagacgagcgcgcaggtgaacgctgttctggagcaggtcgtgtgcgatacgaagcagggcaccggcaaaaacgcctatgttgccgggtatcacatcgccggcaagaccggcacctccgaaaaggtggcgcaggacgccgccggcggaaaaaaggaatacatcgtatccttcatcggctacgcgcccgcggacgatccgcaggtcgtgtgcctcgttttgatggatacgccctcaaacgagagcggtatctatatctccggcgggcagatggccgcgcccgtcgtcgggcgcatcctcggcgaagtgctgccgtatctcggcgtacagccgcaatacagcgaagcggaggaaaaatacatcgaccgcgccgtgccgccgctcaccggcaaaacgccggaggaagcggtaaagctgctccgcgaggcagggctcgccgcccggatcgaagtgaccggcgacattgtcaccggccagctgccggggaagggaacggtcgttgcgagcggcacaacggtgctcatctataccggtgagataccggaggcagaagaggagaccgtgccggagctcacggggctcacctataccgaggcgcgggaagcgctcttttcacgaaggctgttcctccgctcggacagcacgatcctcgccgacagcgatacggtgcgcgttgtgttccagagcaccggcgcgggggagagcgtccccacgggcagcgtaattgaggtcagcatcgtcaacgacgataacgatacatacggccggtattga

SEQ ID NO: 427 - DNA, 1743 bp, Unknown
  Unknown gut bacteria
atgaaacgaaccaataaagcaaacggcatccgctccgcggtgccgcgccttacgggctatatgcgctcaagcatgggcgtcatcatcctggcgctgatcctcgccgcgctcagcgcggtgatgacgatccttgggccgaaccagatcggccggatcgccacgctgatgtcgaacggcctcaccggaaacatcgatctcgcggcgatcgccaaagtcggcattttccttgctgtcatctatgtgctcagtgcagttttcagctttatccagcactacacgatgtctgtcgtcacgctgaaaatgtcctaccgcatgcgcggcgagctttccgccaagatcaaccgcgtgccgcagaagtatttcggcacgacctcgcagggcgacattctcagccgcatcacaaacgacgtttccaccctgcagcagggactcacgaacagcctgcccacgatcatcagcgcggccacgcagtttgtcggctgtctccttatgatgttcgtcaccgagtggcggctcgcgctcgtttccatcggcgtgacgatcctcggcatgctgctgacggtgctgattctgtccagatcgcagcggtatttcgccgcgcggcagaaaagtctcggcgcgctgaacgggtatgtggaggaaatgtactccgggcatgaagtcgtgcggctcagccgcgccgggcggaagatcggcgcgcagttcgatacgctcaacgccgccgtttacgacgcgaactggagatcgcagtttctctccggcatgatgcagccgcttatgaacattgtcggcaacatcgcctatgtcgcggtgtgcgttctcggctcgattctcgcgatgaacggcacgatcgagttcggcgtgatcgtctcgttcattctgtatgtccggcttttcacctcgccgctgacgcagatggtgcagggcatgacgaacatgcagaccgcctccgcctccgcgcaccgcatcttcgattttctcgaaagcgaggagatgcccgacgagagcgaaaagaccgcgaagctcaccgatgtgcgcggcagggtctgctttgaccatgtccggttcagctatccgagtgacccggacaagatcatcatccgggacttttccgctgaggtgctccccggacagaaagtcgccatcgtcggcccgaccggcgcgggcaagacaacgatggtcaatcttctcatgcggttctttgagatcaacagcggcagtataacgatcgacggcgtacccatctccgaaatgcgccgggaggatgtacacggtctcttcagcatggttttgcaggacacctggctctttgagggaacggtgcgggagaatcttgtgtacaacatggagggcatcaccgacgaacagctcgaagcggtctgccgcgcgtgcggactcgacaagctcatccattcgctgccgcaggggtttgatacggtgctctccgagagcgccggcatttccgccgggcagaagcagcttctcaccattgcccgcgctatgctgcaaaatgcgcccatgctgatcctcgacgaggcgacctcctccgtcgatacccgcacggaagttttgatccagcgggccatggacgagctcacgaaggggcgcaccagctttgtgatcgcgcaccgcctgtccacgatcaaaaacgcggacaagatcctcgtcctgcgcgacggcgacgtggtcgaaagcggcacgcacgaagagctcatgcagcgcggcggcttctacgccgagctc

SEQ ID NO: 428 - DNA, 1362 bp, Unknown
  Unknown gut bacteria
atgcaaacttttttgaagaacggctatatcgtctccatggatcaaaacgacaccgtgtttgacggcggcggggtgctcgtggaaaacgaccgcatcacggcggtcggccgggtcgatccggcgaagatctcgcccgacgcggaggtcatcgatctgcgcggaaaatatgttctgcccggatttgtgaatacccacgtccacacctcgcagcagatatcccgtggtgtcggcgacgatgtggattttatctgctggctgcacgagagaatgtggccctttgagagcaatatgacggaggaggattcctacgtttccacactcatgacgagcctggagctgatccgctcgggcgtaacgtcgtttgcagagccgggcggtcagttcgtctccggcatggcgcgggccacggagcagtccggcctgcgcggaaagctcgccaagtcggtgatggactgcggtgaaggcctcccgccgatctggcagcgcacgatggagcaggagcttgagcagcaggtcgcggatatcgaaaaatatcacaataccgctgacgggcgcgtgcaggtatggtttggcctgcggacgatattcaacaacaccgatgagctttgcgtccgcacaaaagagcttgccgacaagtacggcgtcggcattcacatgcacgtggcggaagcaaaggaagaaaaggaatacacctatgcgcgctggggcgaggggacggtaaagcacctcgaacggctcggtgtgctggataaaaatctcctggcagtacacacggtctggctgaccgatgaagagctggagctcttccaaaagcgggaagtgaagatctcgcacaatcccgcgtcggccatgcgggtgctgggttttgcccgcgttccgaaaatgctgcagatgggactgatgccgtccatcggcacagacggcgcttcgtcctccaatcacatggacatggtggatgaaatgtggctcaccagccttattcataaggggtggcggctcgatccgacggtggtcccgtcacaggatatactgcgcatggcgacgaagtggggcgcgcgtgcgcttctcgatgaaaatctgtatggcagtctggaagccggaaaaaaggccgatttgatcgttattgatccgcacggaccatccatgatgccggtcaacgataaaattgccgcgctggtcacggcgatgcattcggccaatatcgaatccacgatgtgcgacggcaagtggctcatgcgtgaaagaaaaatcctgacgcttgatgaggaggcaattttgaaagaggcttgtgaacgggccgcggccatttataagcgtgcgggcatcgttctgccggaccgttttccggtcgtaaaagtctaa

SEQ ID NO: 429 - DNA, 630 bp, Unknown
  Unknown gut bacteria
atcggcagccacgcctgcgtagagcttctgaacgccggacattcggtcgttgtggtggacaatctcgtcaacgccaacgcggagtgcctgcggcgcgtcgagcgcatcaccggaaagacgctcgaataccacgaaatggatcttttgaaccgcgcagctctcaatgagcttttcgatacgcaccggtttgactgcgtgctccactttgccggtctcaaggcggtaggggagtcggtgcagcagccgctgcggtactacaacaacaacctcggcacgaccatccatctctgccagacgatggcggcgcacggcgtgaagaagatcctcttctcctcgtccgcgacggtgtattcgccggacaatacgatgcccgtggacgagagcgcccgcaccggcggctgcacgaatccctacggctggacgaagtacatgagcgagcagatcctctccgatacggcgaaggccgacggcgaatggaccgttatgctgctgcggtacttcaaccccgtcggcgcgcatccgagcggactcatcggcgaggatccgcgcggcatcccgaacaatctgatgccgtacatcgcccagaccgccgccggacggcgcgagtatctgagcgtattcggcaacgac

SEQ ID NO: 430 - DNA, 1644 bp, Unknown
  Unknown gut bacteria
atgagatcttccaaaacccgcatatggtgggtcatcgcggcgctcgtgctcttgctcgcggctgccgccgtatggtttttctgctcgtacagcgtctccgacgggcggctgatcgcccgaaaggcggacgtgatcgatcttcgcggtgaggacatctccgcgcaggaagccgaagcgctcgccgcgaagtaccccgataagaccgttctctgggatgtgccgctctccggcggcagccgtccgagcagcgcggaaagtctgagcctctcttcgctctcggcggacgacatcccgctctttgcctgctttccgaatttgaaaagcatcgatgcgtccggctgcgcggattatgaggcgctgctcgcgctgcgaagcgcctatccggcgcttgatctgaccgcgttcgtgaccgtcggcggcaaggccgtgccgatggacgcgcagcgcgccgtgctgcgcgccgatacgccgcttgcggagattctggaaacactgccctttcttcccgagctttacagggtatcctttacgggcggcgcggtatcctatgaaatgcaggatgcgctcaccgcagcgtttccggcgctttccttccgctgggacgtggaagtgctcggcgtgaccgcttcctccgcggcaaaggagctctcctttgccgggcaggcgctcaccgcgcaggacgtgaacacgctctgcgataaccttttccgtttcccggctctcgagcgcatcgacctcaccggctgcggccttacgccggagcagatcaaagccgtccgctccgcgagcggcgccgttaccgtatacgagctggagcttttcggcaagaccgtttcgacggacgctctcgagctggacttcagcggcatacgcatgggactttccggcgcagccgtcattgaggaagcgctcggcgagtttccgctgcttgaaaaggtcgtgctgtgcgactgcggcatatccaacgaggacatggccgcgctcaacgaccggcatgagaatgtccggttcgtctggcgcgtatacttttccgaattctccctgcgcacggacgatacgaacttcatcgccgcgcgcgtgcgcaacgagtttcccatctacagctacgaactggaagtgctcaaatactgccccgacctgcaggcgcttgatctcggccataaaaacatcacgagcctggactttctccgctacgtcccgcatctcaagtatctcatcatcgtcgaaaacgacgtgaacgacatcacgcccatcggcgagctgcaggagctcacctaccttgaaatgttctggacgaagtgcgaggatatctccccgctgcaaaactgcaaggcgctcaccgacctgaacatttcctatgtctactgccgccccgccaaatgccttgaaacgcttgtcaacatgccgcagctcgaacggctgtggtactgcggcaacaatctcaataccgaacagctcgaagagctgcaaacggcgctgccggacaccgaaatgtatctcgccgcgcgcggcgagccgaccggcagcacctggcgcgagcacccgcattactttgaaatgcgcgactttttcggcatgtactacatggccggcggcacgaacggcgtggacgaaaacggcaaccagatcattatcaccgggtga

SEQ ID NO: 431 - DNA, 1443 bp, Unknown
  Unknown gut bacteria
atgcgcgtgctcggcacgctgcttgagggcagcggaaaatacttcgccgtgtgcatccttctgggactgctgctcacggtggttgaaatgatcgcgccgcaggtcatccgcgtaacggtggactcggtgatcgactcgcagccgatggatctgcccgcgtgggcgctccggtgggtggagtcgctcggcggcgtggcgtttctgcgcgcgaacatgtggttcatcgcgctcattcttgcgcttgcgggtctcgtcgcggcgctgctgcgctatggcgcgaacatgttcaacgccaaagcgggcgaaacgctcgtcaagaccgcgcgcgacaggctcttccaccacattgaatgcctgccgtggaagtggcacgccgagcatccgaccggcgatatcatccagcgctgcacgagcgacgtcgagcgcattaaaaactttttccaggagcagttcatctccgttttccagatcatcgtgcgcattatccttgcgctgacgcttatgacgctgatgaacgcgaagctctccatcgtcgcgtgggtcatcgcgccgatcatcgtgctctactccgtgctcttccataacaagatccgcgcgcgctttaccgagtgcgacgagaacgagggcgttctctccacgatcgcgcaggaaaacctcacaggcgtgcgcgtcgtgcgcgcgttcgggtgcgaaaagtttgagcgcgaccggttcgaggcgcagaacaacaagtataccgagtgctggatcagcctgacccggacgctctccgatttctgggcggtgggcgattttacgagctgcctgcagatcctgctcgtggtcgtgctcggcacggtctcgtgcgtgaacggcaatctgacggcgggcgaatttgtgtcgttctcgctttataacacgatgctcatcggccctgtgcgccgtctcggccgtatcatttccgaaatgagcaaggcgggcgtctccatcgaccgtctcggcgaggttttggaagccgagaccgagcaggacgcgcccaacgccgccgaagcgccgatggacaaggacatcgcctttgaaaacgtcagcttccattacggcgaggacggcccggacgtgctcgaaaacgtcagcttcaccgtacccgccggaaagagcttcggcattctcggcggcaccggctccggcaagagcagcctgctgcttctgctctgccgtctgtacgcgcccacggagggcaagatcaccgtcggcggcgtggacattgccgatatgcctgcgcgttatgtgcgcgagaacgtcggcgtagtgctgcaggagccgttcctcttctcccgctcggtgcaggagaacatcggcatctgcggcgcgagcgacgcggagatccgtgccgccgctgttaccgcctgcgtggacggggatatcacccgtttttcgcagggctacgacaccatggtcggtgag

SEQ ID NO: 432 - DNA, 1344 bp, Unknown
  Unknown gut bacteria
atgctggagcatctgcctcttatcgtgtttctggtcacattcgtgctcatattcgtgctgcgtatgccgatccctgcgggcatgatcgccgcatgtacgctgtacttcctgaccgacggtcttatcaagggcgtaggcttcggcgcgctcatcaccggcgcgggcggcagcctgcatctcgtggcgcagaagaccatcgaagcgatatttaccaacggcaccatcgtcgcggtaccattgtttatctttgccgcgaacgtaatgaacgccggtaagatcaccgagtacgttttcggcacctgcatgggtctcgtcggccgcttccgcggcggtctggcgcacgtcaacgtcctcgcctctctcgttttctccggcatgaccggctccgccatcgccgacgcctccggtctcggcaagctcgagatcgacgccatgcgcaaagagggctacgatgacggcttctcctgcgccatcacggcggccagtgccaccatcggcccgatcttcccgccgtccatccccatggtcgtttacgcgatgctcacgggcgcctccgtcggcgcgctgttcatggcgggcatggtgcccggcgtgctgctcgccgtcgcgctgtgcgtttatgtgtacttcgtcgccaaaaagagaaactacccccgcaccgcgcccccgaagctgcgcgactatctcctgtatctgacgaagtccatctgggcgatgctcaccccggtcatcctgctcgtcggcatctataccggcatcatgaccccgaccgaggccggcgccatcgccggactgtacgcgcttctcgtctccttcctgatctaccggctcatgtcctggaggacgctcaagcaggtcctcgtagacacaatgaagggtaccggctccgtttccatcatgatcggcgccgcctcggccatttccttcatctttgccaaagagcagatcggcacgatcctcggcaactggctgctcagtgtcacggccaacaagtacgtcttcctgtttgccgtcaacatcatcatcctgatccttggctgcctggtcgatacctcggtcatccagcttgtcatgatcccgatcctatggccggtcgcggaggcgatgggcatcaacatcatccatttcggcctcatcatctgcttcaacatgatggtcggtctgtccacgccgccgttcggcatgtgcctgttcatcacctcgggcatatccggcacgccgctcaaggatatcattcgggagatctggtggccgatcatcgtcatgctgatcgtgctcgccgtgatcacctacatccccgacgtggtgctgttcctgccaaagctcaccggtatgatggcctga

SEQ ID NO: 433 - DNA, 1125 bp, Unknown
  Unknown gut bacteria
gtgaaagctatcaatcccggacactttcttctgacctgccggctggacaactgggtgcatctgctggaagagaaccacttccatatcgcccgcgaccggctgccgcaggcgctgtacatttccgcaacggcgctcgcgctcgcgcccgcggcggcggcggaatcgctcatttaccgcaagcgcatccgtgaaacaaagatcgaaaaggacccgatcttcattctcggccactggcgcagcggcacaacgtatctgcagaacgtcctctcgcgcgacgagcagtttggctggttcgatcccgtgaacacgatcggcctgccctactcgctgctgctcggccggctcatccagccgccgatcgaaaagggcatccggaacggccgcccgcaggataacgtgcagtactcgctcgatctcccgatggaggagacattcggcgtgctgacgatctcgccgtattcgatcatccacatgatcgcgttcccggaaaattataaaaagtacatcgaaggcgcgttcgtgagcgaccttcccgtggaggaactgcgcaaatgggagcgcagctacgattacgccgtccgcaagctcacctacatcaaaaagggcaagcagctcattctcaaaagcccggacaacaccgcgcgcatccgcgagctgtggggcatgtatccggacgcgcggttcatcaacatccaccgcgacccctacaagaccgtccgctccacgatccacatgttccgcaccgagatggactcgctccggctgaccgaagagccggataacatcgacgagctcatcgagaacacggtcatcgatattttcgagcgcatgtaccgcgagcttttcgagcttgagggctttttcccgaagaaccggtacgtagacatcgcgtacaccgatttctgccgcgccccggtcgatacgctgcgggatatttaccggcgtctggagctctccggctttgaggcagccgcgccgcgctttcaggcgtatgtcgattcgcagcgcggataccagaagaataaattcgacatttcgccccggcttgtgcgcaagatcaacgcgaagctgggcttctacatggaacactacggctacgaaatgcgggaggttgaggaagaatga

SEQ ID NO: 434 - DNA, 1188 bp, Unknown
  Unknown gut bacteria
atgcagaaaatggtaaaacccatccggctcgttgtgctcgccgtcgtctttgtgctgctgctcggcgtttacttcgtcgcgctttataagctgcagatcatcggcgggcgcgaatactacgccgtaggggaaacggagacgaaagaagacatcaccatcgccgcggcgcgagggaacattctcgaccgctacgggcgtctgctcgtgtccaactcgctctgcaacaacctgtctatcaacgtaacggagctcttcagtcaggacgacccgaacgcggtcattctcgagctgtgcagcgccgtggagcgcttcggtgacacctataccgacacgctgcccatcacgaaggccccgccctttgagttcaccgagatggacacgctgcagaagagcatgctcgacgcctggctcaaggcgaacgacatgccgctcgactccagcgccgtggagatcctcgcggcgatgcgtacgcgctacagcgtcggcagcgagtataacgccgaggacgcccggcgcatcgtcggcgtccggtacgagatcaacgaccgcttcaacatcaacaccacgccctacgttttcgccgaggacgtttcgatgccgctgctcacctatctcatggagcaggacatccccggctttgagctttcctcgtcctatgtgcgcgaatacaaaacgcagtacgccgcccatctgctcggctacaccggcaagctgacggcggaggaatgggcgacctacgccggcaaggactactcgctcgacgcctacgtcggcaaggatggcgtggaatacgcctttgaggattatctccacggcgtggacggcgaggcggaggtctactccaatctcgacggcgtcacgctccgcaccaagtacaccaaggagccgcagcccggcgggcatgtctatctgacgctggatatcggcctgcaggaggtgtgcgaggaggcgctcgccgcgcacatcgagtcgatcaacgaagagcgcgcccgcatcattgcggaagccgaaatgtacggcaccgagagcaccgaaatgatctccggcggcgcgctgtgcgtcgtgaaggtcgataccggcgagccgctcgcgctcgtgagctatccgacctacgacgccgccacgatgctggagaattacgaaacgctcgtcgcggacgagaacgccccgctctataaccgcgcgctc

SEQ ID NO: 435 - DNA, 1383 bp, Unknown
  Unknown gut bacteria
atggaggaaacaaacagcctggcccggtcccggcgcatgggcgaaatgccggagggaaagctgctgctgtcaatggcagtgcccatgatgctctcgatgctggtgcaggctctctataatattgtggacagcgtatatgtggcgaaggtgtcggaggactgcctttcggcgctctcactcgcgttcccggcgcagaacattctcatcggtcttgccaccggcacgggcgtcggcgtttcgacgatgctctcccgcgctctcggcagccgggacaacaagctcgccaaccgcgtggcgggaaacagcctgttcctctgcgtgtgctgctggattgttatggcgatcttcggtattttctttgccgacgccttcatccactcgcagacggatatcgagtccatccgcagctacggagattcgtatctgcgcatcgttacgatcggctcggtattcgtgtattttgagatcaactttgagcgccttctgcagtccacgggccagacgaagctctccatgtgggcgcagataatcggcgcggtggcaaacatccttcttgacccgttctttatctacggctggtgcggcctgcccgcgttgggcactgcgggcgccgccatcgccacggtcatcggccaggcgttcggcgcgctggcgggctttctgtttcaccacaaacataataaagaagtcaatatccgtctttccgactgccgcccggacgggcacatcatcctcgacatctatcgcatcggctttccgtccatcctcatggtcggtatcggttcccttacgaactatctcatgaaccgcatcctcatggcgttcacgtccacggcggtcgcgttgtacggcgcatacttcaagctccagagcttcttcttcatgccggtgttcggactgaataacggcattgtccccatcgtcggctataactacggcgcgcggaaaaaggaacgcatttaccggacgatccgctacggcgtgctgtatgccgtgtgcatccttgctgtcggcctgctgctctttgaagcgatccccggcgtgctgctgcaggcgttctcgccgtcggagcacatgcttgccatcggcattcccgcgctgcgcaaaattgccatccatttcccgatcgcggcgttctgcatcgtgggcgggtcggtctgtcaggcgctcggaaagagcctctattcgttcttcacgtcggtgctgcgtcaggtcgttgcgctcattccggcggcgtatcttctgtcgctgacagggaacgtcggcaatgtatggtggtgcttcccgatcgcggaggtcgtatcggcgtgcgcaacggcgtttttcctgcgccgcgcgctgcgaaatatggaccgggagctgacgctcgcggaggggcaatga

SEQ ID NO: 436 - DNA, 1431 bp, Unknown
  Unknown gut bacteria
atggaaaatcatacttccgattaccgcgtagaaaaagactccatcggcacgaaggacgtgccggcaaacgtatattacggcgtgcagtcgctgcgcgccgcggaaaacttccccatcacggggctgcggatgaacccggagctcatccgcagtcttgcctacatcaaaaaggcggcggcactcacgaaccttgaggccggactgctgaacgagcgtatcgcaaacgccatcgtgcgcgcctgcgacgagatcctcgcgggaaagctgcgtgagcagttcattgtcgatcccgtgcagggcggcgccggcacatccatcaacatgaacgccaacgaggtcattgccaaccgcgccatcgagctgctcggcggcgtcaagggcgactactcgctcgtcaacccgaacgaccacgtcaactgcggccagtccaccaacgatgtcattcccactgccggaaagatgacgacgctgcgccttctgaaaaagctggagaccgagctggaccggctgcgtgccgcgtttgaggacaaatcccgcgaatttaaccacgtcatcaaaatgggccgcacgcagatgcaggacgccgtgccgatccggctggggcaggagtttcgcgcctatgccgacgccgtgcggcgcgataccgtgcgcatgggcaaggccatggacgagatgcgctcgctcaatatgggcggcacggccatcggcaccggcatcaacgcggacgaaacgtacctgcggcgcatcgtccccgtgctgagcgaggtatccggcatggagctcacgcaggcgggcgatctcatcgactccacgcagaacccggacccgtttgtggcggtgtcgggcgctgtcaaaacgtgcgcggtgacgctctcgaaaattgccaatgaccttcggcttatgtcgtccgggccgcgcaccggcttcggcgagatcaatctcccggcgcggcagaacggctcgtccatcatgccgggcaaggtgaacccggtcattccggaggtcatcaaccaggtggcgttcctcatcatcggcaacgacatgaccgtcaccatggccgccgagggcgggcagctcgagctcaacgcctttgagccgatcatcttctactgcctgttccagtcgatcggcacgctgacctacgccgtgcacacgttcgtggacaactgcgtcaccggcatcaccgcgaacgaggagcgctgccgggagcttgtcgagagcagcgtcggcgtcatcacggcgctcacgccgcacatcggctatcagcacgccgcggacatcgccaagcgcgccatcgtcaccgggcagagcgtccggaagctcatactgcaggaaaagcttctcacggaagaggagatcgacacgatcctcgatcccatgaatctaacaaagccgggcatccccggcaaagagcttctcgcgcacaagtaa

SEQ ID NO: 437 - DNA, 1434 bp, Unknown
  Unknown gut bacteria
atgattgtcaagaacagcaagaaagaaaaaaacaccgttacctttgatgtcgagctcgacgccgccgagtttgaaaagtatgtcaacggtgcatatctgaaggctcgcagccgcatcatggtccccggcttccgcaagggcaaggcgccccgcatggtcattgagggcatgtacggcaaggacgtgttctatgatgacgcctttgataacgccgcgaacgacgcttttgcgttcggcgtcgctgagggcaagctcgagaccgtcggccgtccgaccatgaccgattccaaggtcaccgaggagaacggcgcgcttctgagcttcagcaccgacgtttaccccgaggtcaccctcggccagtataagggccttgaggcggagaagccctccgttgaggtcaccgacgaagaggttgacggccacatcgagcgcctgcgcaagcagaacgcccgcctcatcaccgtggagcgtcccgcgcaggacggcgacaccgtgaacatcaactacgccggcatgctcgacggcatcccgttcgacggcggcacggcggagaaccagaatctcgttctcggctccaacaccttcgttcccggctttgagagccagctcgtcggcatttccgccggtgaggagcgcgatcttgacattactttcccggagaactacggccacgatctcggcggcaaggccgtcgtgttccacgtcaagtgcaacgaggtcaagtttgaagagctgcccgagctggacgacgagttcgcgaaggacaacgactttgacacgctcgccgatctcaaggccgacatccgcgccaagtccgttgaggagaaggaaaaggccgcgaagaacgcctttgacgacgccctcgtcgatcaggctgtggagaacatgaccgttgatatgcccgaaggcatgatcgaagagcgcatggacggcattgtccgcgagtacgcgcagtacatggccaaccagggcatccgcatcgacgattatctcaagatgatcggcaccgatatgaagaccttccgcgagagcatgcgcgccaccgccgaaaagcaggcccgcaccgaggtcctcctcgccgccgtcgccgaagccgagaatgtccagatctctgaagaggatctgcaggccgagtatgagaagctcggtgaagcctacggcatgaaggccgaggacgtggcgaaggccatcgatgtcgccggtctgaccgctgatctgcgccgtgagcgcgctatgagcatcatctccgagagcggcgttgccgtggagaagaaggccgaggagcccgccaagacggaggaagcgtccaaggccaagaagaagcccgccgcgaagaaggccgccaagaccgaagagaccgagggcgaggaagcgcccaaggccaagaagaccacccgcaagagcaccaagaccgaggagaagacggaggagtga

SEQ ID NO: 438 - DNA, 1470 bp, Unknown
  Unknown gut bacteria
cgcgatatcccggccggcggcagctacggccgtctaaacggggagaacgggtatttcttttttgcgcagagcagccgcggcgcggacaacggcacggggtaccgcatggtggcggcaaagcccacggtcgatatcgccgcgggcgtgtacgacgacgccgagagccttacgctgacgatcaccggcgagaacgtgcactatacgctcgacggcagcgacccgacggcggacgatccggcctataccgcgcccatcacgatcacggaaacgacgatcgtccgcgccgcgagcttcccggcggacgcgctgccgggcaaagcggcgacatggtcgtatttcctgcgcgagaacagcacgctgcccgtcgtcagtcttgtgaccgacccggacaatctcaccggcgcgcagggcatttactccaaccacgaacgcgcgtggagcgagaagtgggagcgcgaggcgaccgtcgccatgtacgaggacggcggcgagttctccattgactgcggcatccgcatgcacggccgcacgagccgccgtgtgagcgaaaagaagtcgttcacgctcaaattccgcggccggtacggcggggatctcaattatgacgtgttcggcgacggcgtcgtgacggacttttcctcgctgctgctgcgcgcgagcgtggaggatacctacacctcctacatgcgcgacgagttcttcgcccgcatcgccatggactatacggatgtgcccgcgcagaattaccggtatgtttcgctcttcctcaacggcgagtactggggcatttacgccatccgcgagcaccacagcgcggaatacttcgcctcgcacaagggcgtggacgccgacaccgtcgatatgcagacgggcgagtttgaaggccagaccgcgtggagcgagatcttgaactacgcgcgctacaactcgctgagcacgccggagggctgggcgtacatccaggagcatgtggacatcccggagatgattgactggctgattctcgagtgctggtcgggcgatatcgacgtatacgaaaacgtccgcttctacgcgagccccgagtacgaaaacgggaagtacatttacggtctcgcggacatggatctcacgatgatgggcatggactcgatgagcgtcggcttcaacaacttccagctccacggcatcattccctcggcgctgcgttacaacgaagagttccgcgatatgttcctgacgcgtctcggcgaaatgctgcgcggcccgctctcggacgagaacgcgcagaaaacgctcgatgagctgcgcgcgatcgttgagccggagagcgcgcgtgatctcgcccgctggggcaagtcgtccacgttgtttgccacgcagatggcgaatctccgcggcttcgtctccggccgcgccgcgcggatgcagaacgaggccctcgccttcttcggcgtctccgccgaggatgccgccaaatacttcgggtaa

SEQ ID NO: 439 - DNA, 1986 bp, Unknown
  Unknown gut bacteria
gtgcgccgcgtcgtcatcacggcgaaggacggcaagtatcagctgacgctcacgctcaacggcaccagctacgattacctctaccccggcaccggcacgcaggccgacgccgttgaccggagcgagtgggctcccgccaaggtcgtgagcggcacgatcgacggcgagacgcgcgacaactggcacacctacaccatcacggtggataagctgacgaacccgctggccgtcacctctcacagccagaagaacgacaagtggtacgaccgcagcatcacgctggacatcggaaatctcaagcgcaccgccgaggacggcaagtattccgccgcggccgagtgcgacgcggcgatgttcaagatcatcgacacgaagctcaacgttgtgaacggcgcgatcatggccacgctgacgctcagcggcaccggctacgattacctctaccccggcacaggcgacgaggccgagaaggacaaggacaactgggcgcccttcgccgtggacgaaaacggcaagtacacctacaccatccccgtgtctgagctcgacaagcccctcatcatctcctcgcacagcctgaaaaacaacatctggtacgaccgcacggtgacgttccgctccgattcgctcaagaagatcggcgacgcggccgaccctgtcactccgacacccacgccgaccccgacgccgacgcctaccccgaaccccaccaatccggacaacgaatccgatcacgaaaccgacaccagcggctccacctcccgcgtggataacagcacgacgctcaaggacggcgtctacgcgcccgacagcttctccttctccggcggctccggccgcgcgcgcatcgtgtgcgacaaggtcacggtgaagaacggccaggcgtacgctaccatccgcttcgtgagcagcagcggcaacccgccgcagtactcctatgtgaaggcctccggcaacacctattactccaacgacggcagcaccttcacgatccccgtggagctcaacaagaacaaccgcattctcggcatgaccaccaagatgtcctccgcgcacgagatcgagtacatcatcttcgtgcagctcaagacgaacgcgaacaaccagaaggacaacaccgacggcaaaacgctcagcaccgaagcgcccgagatcatgggtctcacgttccaggaggagatcaagctcgagcacgcgcagtatctcaagctcttccgctatgagggcaacatcgtcctcgcggagatcgacgtcataagcgacacggtgctcgacaccgacgaggcgaaggccgagatcgccaaggcggacagcgccgccgcgtccgacggcacggaagaagccgtcgccgaggaagagagcgccgacaacgcgcagatcaaggccgactacgtcgccgggctctataagcagaacgtcctgcgctatctgttcgttccggaaggaacggagctccccgcgggccttgaaaagcagctcatcatcgtgacgctgccggcgaagagcatctatctgatggacgaaacgcccgtcgatacctttgagatctttgaagcgctgaaccttgtcaaggtgttcggcgcggagacgagcgagaacgagatcctcagcaagggtcttgccgacggcagcgtgctgtacggcggcagctgggataagcccgagtacaagaagctcgtgcagaacaagaccgatctcgcgatcacgtccggcaagctcctgccgctgagcggggaaacgctcaccgagcgcaagcagaccgcccccgctgacgcggagagcctgacggcggtggagtatcgcgaccgtctgtacgatctggccgaccgcttcgccgtgctcgatatcccgatgctcatcgaccgctccgccgacgaggccgacgctctcgcgcaggccgactggctgcggctctacggcatcctcttcggcgacgagacgaccgccgagcgcatgatccgcgaaattacctcccgggagggttaa

SEQ ID NO: 440 - DNA, 792 bp, Unknown
  Unknown gut bacteria
atgcaaaattcaaccgacagaaggaaaatcatgagcgaaccgatcgtcagttcccttgccaaagcgctccgcgttctggaatgcttcacggtcagcgagccggagctcggcgtcaccgagatctccaaaaagctcgggatcggcaagtccaacgcgcacaacatcatatcgacatactgccagatgggttatctgcagcagcttcccaaccggaaatacacgctcggctacaagctgctcgagcacgcgttcatcatcaaccagcatctcggctatccgcacgcggtgtacgatctcctgcttgaggccgccgagcgcaccgggcaggtcgtctacttcggcatcccgtacgaaacggacgttctgtatctgtatgtcgcccatccgatcgcgcggatgaaggagctgccgtaccgcgagatctgcggcgagcacgccccgctgtgtaccacgggcatcggcaaggcgatcctcgccaatctccctccggaggaatggctctcccgcctgcccgagatcgttcccgcgcacacaccgcagacgatcaccgataaggacaagatcctgcaggagctgcagagcacccgcgagcgcggcttcgccatcgacaactgcgagcacgagctgaacgtccgctgcgtcggcgtgccggtctataacgcgagaggcgctcttgtcgccggcatcagctcctccggcgcggtgcaggtcatgaccgaccggaaggtcatggaatgcgccgacatcctgatgggtatcacgcagcgcatcaaggaaaggctgtacgcctga

SEQ ID NO: 441 - DNA, 1434 bp, Unknown
  Unknown gut bacteria
atgacactgcggccaaagcccttccagccgatcaaaatgctgcagatcatcggcggcgttttcttcgcgtatctcttcttcgggtttatgctgctgccgtgcctgaacacgctcaccagcattttcaccgtcaagaacgccgccggggaaaccgatcccctcgcggtcatccgtttcttcctcgccgggtccatgtcccagtatgtgtggaactcgctcaagctggcgctgtgccttgtcatcacggtcaacgtcgtcggcatttccatcgtgctgctgaccgagtactttgacatcaagggcgcaaagatcctccgtctcggctatatgacgacgctcatctactccggcgtcgcgctcgtcacgggctacatgttcctgtacgccagcgacggcatcatcaccacgcagctcaaggacgcgttcccgaacatcaatgtcaactggttcaccggcttcaacgcggtgctcttcacgatgacgttcgcctgcacgagcaaccacgcgctcttcctgcgcaacgccatccgcggcatcgactacaacaccgttgaggccgcccgcaacatgggcgcgaagcccttcaaggtgctctggaaggtcgtgttcccgacgcttctgccgacgctcttctcgctcacggtcatgacgtttatcacgggcctgtgcgccatgagcgcgccgacgttgctcggctatgactccatcaaccccgagatcgtccgtctggccggttcgtccgtggcggacgaggcgttcccgcaggcgcgcgcggcgctgctttcgatcatcctcgcgtgcttcacgatcctcctgctcaccgtcctctcgtcctatgagcgcaaggggcattacctctccgtttccaagacaaaggcgaagctccagaagcagaagatcacgaaccccgtggcgaacgtcctcgcgcatatctacgcctacgtcctgttcatcatctacatgacgccggtcgtgatgatcgtcatcttctcgttccagacgttcagcgccgtgcgtatgcgcaagcttgatctttcgcagtggacactcgtgaactacttcggcaagcaggactattcgtatctcacgtcccgcggcacctacaagatccgcgagggctcgatctccggcgtgttctccaacgaggcgacgctcagcggcatccagatgagctttgtcatgtccgtcatcgccgcggcgctcgcgtgcgtgatcgtcgttgtggcctgcaactacatcttcaagcacaagaagaccggcacgatcctggagtacgcgctgctcttcccgtggctgctgccgacgatcctcatctgctattcttaccgcacgttcttcaacagcagcgacgtctggtatgtgttcggccagaacctgtactatgccgaccgcgtgaggatattgatcgttatcgcgtatacggtagtaaagctg

SEQ ID NO: 442 - DNA, 1032 bp, Unknown
  Unknown gut bacteria
atgagccttatcacactcatcctcgtccttgcggcggcggccgtgctcatcgtgctcggcaccacgcgcagaaaggacggcggcgacgggaaaaagaccctgccgcgcacgatcgtgacggccgcggcggtgctcgtgctcgtcggcgcgctgggcttcggctcggtgtaccagctgcaggaggacgaatacgccgttatcaccacgttcggcaagccgtccgtcgtgagcacgtccggcctcaagttcaagatccccatcatccagcagaaaaccatcgtcagcaaggcgacgcaggggtttgctctcggctacgatctgcgcacgaacgtgaacaacgaggacgaatcgctcatgatcagcgtggacttcaacttcgtcaacgtggatttctatgtggaataccgcgtggacgacccggtgaagtacctttataacagcgaagagccggaagccattttgaaaatgctctgccagagctacatccgcgatacgatcggcctttacggcgtggacgatatcatcacgaccggcaaggcggagatccagggcgtcatccgcgacaagatcagcacccgtctcgagcaggaggatatcggtctcgtgctcgtgaacatcgccctgcaggacgccgagccccccacgctcgaggtgcagcaggcgttcaaggcggtggagacctccaagcaggaggcggagaccgccatcaacaatgcgaacaagtacgctaacgagcagctgcccgccgccaaggcgaacgcggacgaaattctgcagcaggccgaggcctacaaggaatcccgcatcgccgaggccgagggtcaggcctcgcgcttcacggagctgtacgccgaatactccaagtatccggagatcacgcgccagcgcctgttctatgaaatgatcgccaaggtgttcccggatatgaagatcgttatcaccggcagggacggcagcacgctgcagaccgttctcccgctcgagagcttcaccggcacgaacacaacgaccacgacaggggaggagccgtaa

SEQ ID NO: 443 - DNA, 1428 bp, Unknown
  Unknown gut bacteria
atgaaagcaaacattcttgtttatgatgtcggcagcacctatacgaagggcgcggcctttgcccttgcggacgggaaactgacgttccttgcccgcggccagcacccgacgacgctggagaacatcagcgacggcgcgcgcggcgccgaggcggagatccgcgccaagggcgtggaattcgcgcccgatatggttcggttcagctcgtgcagcgccgcgggcggactgcgcatggtcgccatggggtacatgccccgcgtgaccgcgaaggccgcgaaggaagttgccatgaccgccggtgcgcgtgtcatggaggtcgtctccgcggacgagccgcccgagttccgcgaggaagtgctgcgcgagatcaagcccgacatcatcctgctctccggcggtacggacggcggcgacatggccaacgtgctcgaaaacgcggacatcatctgcaaggtgcacggcgaaggcacggtcattctcggctgcaacaagttcgcccagcgcgaggcggcggagaaattccgcgccgcgggcattgactgcatccgcgtgccgaatatcctgccgacgatccacgagctgaacgtgaagcccgcgcgcatcgccatccacgagcagttcatcaaccagatcacccatgcgaagggcttgcaggagttccgcgattcgctcgcggatcagaccgtcatcccgacgccgggcgccgtgctccttgcgagcgagctgcttgccaagggcagctacgagcaggagggcgtcggcggcgtgatcctcgtggatatcggcggcgctacgaccgacatccattccgctctgcccgagctcatcgacatgaacatcgaagagcgcggacttgttgtgagcaacgaaaagcagttttcctaccgcaccgtcgagggcaatctcggtctgcgcgtgagcgcgaccggcattcccgaggccgtgggcgacaaggccgttctccgcgccatggaccacgattacggtctgacgccggaggatgtggaaaactatgtcgatctgctcgaagcgcacaacgatcacattcccgccgacgagaaggaggcctgtctcgaccgcgcgcttgccgcgtgcgccgcggacgttgccatccgccgtcacgccggatattacgcgaaggaggccgatcccgtcatgggcatcatggccggcgctccgatggggcgcgatcttcgcaacgtgcgccaggtgctgtgcgtgggcggtattttcctccactgccacggcgaggagcgcgagaacatcgtgcgccgcacgttcgataaccccggcatctccctgctgccgctcaacgacccggacatctggttcgacgaggactacatcctctacgccatgggcgttctggcgcagcacttccccgaagaagttctttcgtacatgaaagagcatgtgataaagaaataa

SEQ ID NO: 444 - DNA, 1296 bp, Unknown
  Unknown gut bacteria
atgaataattcaaacgaaacgaaagaaaggaaaaagctggatctcaaacgaatcacggacagccgtgttttctggatgatcctctcgctgcttgcggcgtcgcttctctggatgtatgtgacgacgaccgagggcgttgaggtggaaaaaacgctcaccggcgtaaagatcgagtttctcggcgcggacgcgatgcgcgcgtcgagcgatctcatcgtcaccgagcaggaccgcaccaccgttaacctgacgctctccggcacgcgccgcgtgctctccaagctcacaaactccaacgtgacggcaacggtgaatctcagcaacgttgtggcggacgggcggtattcggtttccttcgatatcgcctatcccgccggcgtgaacgcgaacgaaataacgctcgtccacacgtcatcggacgtcgtgaatttctatgtggacaagctagcccgcaagaccattgaggtcaagggcgcgttcaccggcaacacggcggacggatatcttgccgacgagagtatggtgttcgatcctctggtcgttgccatcagcgggccgaagacggtcatctccaaagtcgaccatgcgtttgtggccattacgcgtgaggacgtggaccgcacgctgagctattccacgacgtattctctcgtcgattccgacgataacccgatcgaagactcttccatccagcgtgaaacggaagaagtcaccgtgacgctgaacgtgctttccacgaaggaagtgccgcttgacgtaacgatcatcgatggcggcggcgcaacgcgcgacgccaacacccgcattgacattgaaccgaagacgatcatgctcgcgggagatgcctccgccatcgacagcacgacgaagctcattctcggcacgatcaatctttcgagcttcgccacggacttctccgccacctacaccatcatcccgccgaacggcaccgagaatatgaccggcgttaccgaggcaacggtgagagtatccatcacgggcgttgccacgaagtccttctccgtgaatccggaaaatatcgtctgcatcaacgttcccgacggctacaccgcggagaacatcacgcaggcgcttaacgtaacggtccgcgccccgcaggaagtccttgaccagatcagcgaggtaaatctccgcgctgtggccgatctctccaatctcggcacgaacgcctccggcgttttcaccccgacggtcgagatcaagatcgacggcttccccgaagcgggctgcgtcggcgaatataagatctatatcacgctcaaggaaaagcattaa

SEQ ID NO: 445 - DNA, 1659 bp, Unknown
  Unknown gut bacteria
atgaaatacagaaagatctttgctctgctgctcgccgcggcgacgctcttctcgcttgccgcgtgcggcgagaccgccgccgggccggaggcaacgcccgatcccgcgctggacgagagcgccgcgaccgtctccggccagacgctcaccttcgccggcgccgcggacgatgtgttctcgctctcgctcgactacgaggagagcctcaaccccgtcaagacgcagagcacgctcaatcagctcgtggactgcctcgtgtacgaccggcttttcgaggtcgatgagaacttcaacgtgacgtcgcgcatcctttcggactggtattactccaagaacgaagacagtgcgggcgtgtgggtgctcaaggtgagggagggcatccagatgcacgacggctccacgctcaccgcgcaggacgtggcgtattccgtgtcctgcatcttcacgagcgagagacacaagcatctgcagcagcaggtcgggcgcgtctattcgagcgcgtacaacggcgaggtgtatctcgccgtggaaggcgcggacaatgcgcagctcccgcagcgcatgagcatcccgatcatcaagtccggctccgtcggcgacgaaatccccgtcggatcgggcccgtatatgtataatgaagaccgcacggcgctcgtgaagtttgacgggtatgaaaacagcgagagtctcccgctcgacgaggtgcagctgcgcgcctaccgcggcatggaggagctcatcaccgagtttgaaagcggtctcgtcgatctcgtcgtgaacgacccgaccggcatttacaacatgggctacggcggcaaaaacgaaaagcgcaccatcaccaccacgaatctccacttcatcggcttcaacagccagagccgcttcttccagtatgacgcctaccgctacgcgatgaactggatcgtgaaccgcgacaagatcgtatcggacacgctcgacggcaacgccgtggcgacggtgctccccgtccacccgaacagcgcgctgtacgatacctcgatcgcctcgcagttttcctacgatccatcgcgctgcctcaccgagctcgagcgcggcggctgccgcgatctggacgcggacggcatgcttgaatttgcgctctccggcatgaaggtggacattgagctcaacttcgccgtctgcgccgacaacgccgccaaggtgcaggaggcgcgccggatcgccgaggatctggaagccatcggcatcggcgtcaacctgcgcgagcttacatggaaggactatctcgccgcgctgcgctccggatacatcgacttcgatcaggaggagcccgagatcgttatggatatgtatctcgccgaggtcgcgctgaccggcgactggaacatcctcacgctgttctccggcgactgggaggatgacaacaccctcaactacggcggctgggacaacagcgagctggaggagctcaccgaggcctatctcggcgcaaaggacgacgaccgcgcgcaggccgtaaacgactggctgcagctcctcacgacgaccacggtgatcctgccggtgtgctttgagacgcgcgaggttatctcccatctcggcgtgatctccggcatgtcgcccaaccagtacgacgtattcaataatattaccgcctggacagtcaatatcggctga

SEQ ID NO: 446 - DNA, 1602 bp, Unknown
  Unknown gut bacteria
atgacaaacgcaaaagagaaaaagaagatcgtcctctggctgatcgtactggcaatactcgccgcggcggcgttcacggtcacggccattgtgcgccataaccagcgcccggcgtgggacggcggctacagcgtccacatcagcgaggtcatgaccgataataagacctgcccgaacggcgagggtgtcctctgtgattggatcgagatcgaaaacacgtcctcgaaggacttctccatcggcggatactatctctctgacgagacgggcaaaggcaaatactgcttcccggcggggacggtcgtcccggcgcgggggtatctcgtcgtgtggtgctcgccggacgaggagggcgactatgcgccctttgccctgcgcaaggcaggcggggagacggtgtgccttatgaacgaaaaccgcacggtgctcgacagcgccgttaccgctgcgtgccggagcgggcagtcgcttgtccgcggcagcgacggcgcggtcattcctgccgatacgccgacgcccggctacccgaacaacgaagcgggcgcaaaggcgtggcaggaggcgctcgcgcagcgcagcggcggcacgcttgagctcagcgagatccagtcctcaaacacgctctatgccgcgcccgacgggaatttctacgactggatcgaggtacataacccctcggattcgccggtatctctctccggctacaagctctcggaccgcacgaacaaaacgaagtacgccttcccggacgaaatgctcggcgcgggcgaatataagatcatatggtgcgcccccggtgtggagggcgcggaatatgcgtcctttgcgctggcgagcgcgggcggggaaacggtcgtgctcacagcgccctccggcgcggagagcgagagcgtggaactgccgatgctggagaagaacacggcctatgccaaggaaaacggcgaatggacggtgtctcaccgcccgacgccgggatattccaacgacgacgcggggtatgaggcgtggctgcgttccggcggctacgaaaacgacgaaatttacatcaccgaggtcatggcgcaaaaccgcggtacgctcgccgacagcgacggcgacctctccgactggatcgagatcgcaaacctcggcgagacgagcgtcgatcttgcgggctggtatctctcggacgatccggacgtgccggacgaatggaagatcccgtcgctgacgcttgcgccgggcgagtatgcggtgatcttcgcctccggcaagaaccgcaccgagggtgagcttcacacgagcttttcgctcaccgacggcgacacggtcattctctccgccggaaacggcgcggagatccgcagcgtgaagatcgaggccgtgccggaggggtcctcgctcgcgatgcagccggacggcagcttcgccgtgaccgacttcccgacgccggggcttgaaaataccgccgagggctacgccgacttctgcgatgccgacacgcgcacctcgccgcttctgctgtgggagatcgtcgtgtacgaggcgggttcgcccgactgggtggagctcaaaaacgtgtcgggcgagtcgatcgatctttccggatacacgatctcggat

SEQ ID NO: 447 - DNA, 1410 bp, Unknown
  Unknown gut bacteria
atgaagaaatttatcggaaacaaagacttttacaagctggtcgcggcgctcgcgctgccgctgctgctgcagaacgccgtatcgacgtttgtgaacctgctcgataaccttatggtcgggcggatcggcacggaatcgatgtcgggcgtgtccatcgtcaaccagcttctgttcgtatataacctctgtctcttcggcggcacgggcggcgcgggcattttcggcgcgcagtttttcggccgcggagattataacggcgtccggcatacgctgcgcttcaatatcctgctctgcgccgggtttacagtgatcgccacggtgctgctcgcgctcatcccggatacgctcatcggtgcgttcctgcacgaggcaggcaccggcggcgatctcgcgctcacgctctcggaaggcaaggactaccttcgcatcatgctcttcggtctgccggcgttctgccttacgacggcgtatgtgagcatactgcgcgtcaccggcgacaaccgcctgccgatgaaggcgagcatcgcggcgatcttcgtcaatctcgttttcaactatctgctcatctacggcagcctcggcttcccgatgctcggtgtccgcggcgcagccattgccacggtgctctcgcgctatgtggagttcggcctgatcctgctcggcacccacgggaagaaaacgccgccgcgctttatccgcgggctgtaccgcggctttgcgatccccggccatctcgccggacagatcgtccgcaagggcatgccgctgctcgtgaacgagatgttctggtcgctcggcatgacgatgctcacgcagtgctactcctaccgcgggttggacgccattgccacgctgaacatcaactccacggtgctcaatctcttcaataccgttatcttcacgatgggcaataccgtcggcatcatcatcggcaacctgctcggcgcggaggagtatgaccgcgcgcggaactactgcccgaagctcgccgcgctcagctgcgcggccagcgcggcggtcggcgttgtgatgttcctcgtcgcgccgtatgccccgcggctttacaacacctcccacgagatcatgacgctcgccgcgtcgctcatgcgcatctgcgctctcatgctgccggtccacgccgtggtaaacgccgcgtactggaccatccgcgccggaggccggacgtacatcaccatgctttcggacagcgtgttcacctgggtcgtgtcggtatcgatcgcgtgggtgctcatccataaaacgggtctgccgctcgtggaggcgtacctctttgtgaatctcgccgaccttatcaaaatggtcatcggcatcgtgcttctccgccgcggcatctgggtgcgcaacatcgtcaccggcgaggagatcgcggccgggaatgctgcgggctga

SEQ ID NO: 448 - DNA, 909 bp, Unknown
  Unknown gut bacteria
atggaaaatcctgcgcttattatcatggccgccggtatgggcagccgcttcggcgggctcaagcagatcacgcccgtgggcgacaacggcgagatcatcatggacttctcgctgtacgacgcttaccaggcgggcttccgcaaggtcgtgttcgtcatcaaaaaggaacgcgaggcggatttccgcgccatcgtcggcagccatgtggaaagccggatggacgtgcagtatgtgttccagtcgccggacgatgtgccggagtggttcaccgttcccgaagggcgcgaaaagccctggggcacggcgcacgccgtgcgcgcctgccggaacgtgatcgacggcccgttcgccgtcatcaacgccgacgatttttacggcgcaggggcattccgcgcgctctatgattttctcgccgagccgatggcggagagcgagaacgccatggtcgggtatcgcatgcgcaataccgttaccgaaaacgggtatgtcgcgcgcggcgtgtgcgaaacggcaaacggctttctcacctcgatcaccgagcggacgcacattgaaaagcgcggcgaccacgccgcctacacgaccgatggcgagactttcatcgatcttcccggcgatacgctcgtatcgatgaacttctggggcttccgcaagcggatgatgcgcgcgttcgacgagcggtttgaggatttcgtgcgcgagatcctgccgaaaaatccgctcaaggcggagtacttcctgccgtgggtcgcggataaggagatgcacgcaggccttgcgcgcgtgcaggtgctgccatgcgaggagacctggtacggcgtgacgtaccgcgaggatctcccgcgcgtccaggccgccgtagcggacatgaaggcgaagggcgtgtacccgaagaagctctgggaataa

SEQ ID NO: 449 - DNA, 1098 bp, Unknown
  Unknown gut bacteria
atggcacacagaccaaacattcttgcgctcgcatccaagatcagtctcgaaagtctgacgtacaccggcattacctacggcgatcccgagtacagaatccttgatcccatcgtcgatgacgacatgtgttccgttatgatgcgcatgcgtctcgaaaccgacttctccgcggaggatctcgccaaaaagacgagaaagagcctcgatttcgtgcagacgcagtgcgacaagctcgttaaagcgggcgtcatccgcacgcgcgtccgcagcggcgttctctgctactattacccgatctgggtacccggcatcatggagggcattctctccaaccgcgagcagtgcgacgcgcaccccgagctcggcgcgtgttttgaggagtatacccgcatccgcgtcggcatgctcgcccctatgctcggcaacggcgtgaatttcatgcgcgttatgcccgttatgagcgccatcgaaaacgacacgcacaaagcctcctatgacgagatctccacgctgatcgaaaaggcgtgggcaatctccgtcggcccctgctcctgccgaagatcgcgccgtctgatgggcgaaggctgcggccatctggaagaggatatgtgcctctatctcaacgacaacgccatcagcttctccaagaacggcgagcaccgcctcatcaccaaggaagaagcgtacgagatcctccggcgcgccgaggacaacggccttgtccacgaggtgaaccaggccctcggctttgacgacgtcaacgccatctgcaactgctgcggctgctcgtgctacgcgctgcgcatcgccgagctgttccgttcgccgaacggcgtcagctccaacttcattgccagagtggacaaggataagtgcgtcgcctgcggccagtgcgtggaaaactgccagacgaacgccgttcgtctcggccagaagcactgtctcaccgattcgcacatctccgacgcctacgcatccgacaaagagatcccctgggataagaaaagctacaacattgattaccgcaccacccgtaccgacaccatgccctccggcaccgcgccgtgcaaggcggagtgtccggcgcatgttccggtg

SEQ ID NO: 450 - DNA, 2565 bp, Unknown
  Unknown gut bacteria
atgaacgaacgcctgcttttgtcatccgaaggcaggcgttctttacgcaattttaagacggtctttattgaaaaagagcgaaaaaatggtatactgatatataacgcttttttcgggggagggcttggcgctttgaagctgttccgcagaaaaacagaagaggaagccgtccggcaggagatcgccgtgaaggagaccgcgcccttcgagggtctcaccgaggccgaggccgccgcgcgcgccgccgcgggctgggacaatcgcccggttgaaccgcccacgcgcaccacggggcagatcgtgcgggagaatcttctcacgtactttaaccttgtgtttcttgtgctcgcgctgtgccttgtggcggtgaaggcgtcgattttgaacctttcgttcgtcatcgtcgtcattattaacgccgtgatcggcatcgtgcaggagctgcgcagcaaaaaggcgctcgatgcgctgaatatattgaccgcgccgcaatgcgccgttgtgcgcgaggggcgcgaaaagcgcgtggacgtgtcctcgctcgtgcgggacgatatcgtcctcttttcgaccggcgagcaggtctgcgccgatgccgtcgtggtggacgggacgtgccttgtcaatgaggcgctcgtcaccggcgaggcggacgagatccgcaaagcgccgggcgatacgctgctctcgggcagctttcttgtctccggcatgtgccgcgcgcggctcaccgccgtgggcgcggattcgttcgtcagccgtctgacgctcgacgcgaaagcgcagaaaaagcgtcaggccaagggtatgatgaaggcgctgaacgatcttgtcaaatggatcggcatcggcatcatcccgatgggcgtgctgctcgtggtaaaggaagtctgctggctcggccggagcatccccgcaggcgtcacgtccacggtcggcgcgctcgttggcatgatcccggagggcgtgtatctgctcacgagccttgcgcttgtggcgggtgtgctgcgtctggcacagaaaaagacgatgtgccgcgagatggactgcatcgaaacgctcgcgcgcgtcgatacgctctgcgtggacaagaccggcacggtgacggaaaacaaaatgatcgtggacgatatcgtcccgctctgccccgaccggttcatcgccgaggatatccacatgatcatggcggactactgcgcggcgatgcgcggcgataacgacaccatggccgccatgcgcaaattcttcaccggcgaggtgaatcagcgcgcgatcgccgcgctcccgttcacgagcgcgaagaaatacggcggcgtttcgttccatgaggatgagacctatcttctcggcgcgccggaggtcatcctcggcggcgattttgacgcctatcgggaaaagatcgatcactacagcgcgaagggctgccgcgtgctgctcctcgcgctctacgacgggcagctcaccgatgaagcactcaccgccgagcgactgcccatctcgctcatattgctctccaacaagatccgcgccgaggcgccggatacgttcgcgtggtttgcgcgcgagggcgtttccgtgcgcgtgatctccggcgacaacccgctcacggtttccgaggtcgcccgccgcgcggggatcccggacgcggaccgggcggtggacgcccgcacgctcgaaaccgacgagcaggtcgaaaaggcggcgcgcgaatgcgtcgtattcggccgcgtgacgccggagatgaagcggcggctcgtccttgcgctcaaaaaacaggggcacacggtcgccatgaccggcgacggcgtaaacgacgtgctcgcgctcaaggaagccgactgctccatcgccgtggcctcgggaagcgacgttgcctgtcaggtatcgcagatcgtgctcacagactcgaatttcgcctcgctcccggacgtcgtcgccgaggggcggcgcgtcatcaacaacatcgagcgctccgcctcgctttattttgtgaagaacatgttctcgatcgcgatggcgatcatcagtctgatcttcactctgccgtacccgctcagccccgcacagctcggccttgtgaactgcatgacgatcggcgttccggcgttcatcctcgccatggagccgaaccgctcgctcgtgcagggcaaattcctcaaaaacgtggtgcggcgcgcgctcccggcggcgctcacggatatcctgctcgtcggcggcgtgatgctcttctatctggccgccgatctgccggacaccgccatgagcacgatctgtgccggcgtgatgggcgttgtgggactcatgatggtgcaccagacggcgaaaccgtacaacaagctgcgcatcgcgatgatctgcgtactcgcgctcggctttgcggggagctttctgttcctcaaggcgcttttcaaccttgtggcgctcgattttctcagcgcgctcgtgcttgcggtgttcgcgctgcttgcctggccggtgatgaatgtgatgtacaagctgctggataaactcagcgcattcgtgcagcggcggaaaaagacgcgctgcgcggcgaaagaactgtaa

1. A method for determining whether an overweight subject has a reduced gut bacterial diversity, said method comprising:
a) detecting from a gut microbial DNA sample obtained from said subject whether at least one gene from at least one bacterial species from Table 1 is absent in said sample, and
b) determining that the subject has a reduced gut bacterial diversity, if at least one gene from at least one bacterial species from Table 1 is absent in said sample.

2. A method according to claim 1, characterized in that it comprises a step of detecting from a gut microbial DNA sample obtained from said subject whether at least one gene from a bacterial species chosen from the list consisting in MO_HL_{—}5, MO_HL_{—}6, MO_HL_{—}14, MO_HL_{—}9, MO_HL_{—}11, MO_HL_{—}13, MO_HL_{—}3, MO_HL_{—}8, MO_HL_{—}16, MO_HL_{—}4, MO_HL_{—}17, MO_HL_{—}1, or MO_HL_{—}7 from Table 1 is absent in said sample.

3. A method according to claim 1 or 2, characterized in that comprises a step of detecting from a gut microbial DNA sample obtained from said subject whether at least one gene from the bacterial species MOHL-5 from Table 1 is absent in said sample.

4. Method according to any of claims 1 to 3, characterized in that it comprises a step of detecting from a gut microbial DNA sample obtained from said subject whether at least one gene from each of the bacterial species of any of the bacterial species combinations indicated in Table 3, 4 and/or 5 is absent in said sample.

5. Method according to any of claims 1 to 3, characterized in that it comprises a step of detecting from a gut microbial DNA sample obtained from said subject whether:
at least one gene from each of the bacterial species MO_HL_{—}12 and MO_HL_{—}11 from Table 1 are absent in said sample, or;
at least one gene from each of the bacterial species MO_HL_{—}11, MO_HL_{—}7 and MO_HL_{—}12 from Table 1 are absent in said sample, or;
at least one gene from each of the bacterial species MO_HL_{—}11, MO_HL_{—}5, MO_HL_{—}7 and MO_HL_{—}12 from Table 1 are absent in said sample, or;
at least one gene from each of the bacterial species MO_HL_{—}11, MO_HL_{—}8, MO_HL_{—}12, MO_HL_{—}7 and MO_HL_{—}2 from Table 1 are absent in said sample, or;
at least one gene from each of the bacterial species MO_HL_{—}17, MO_HL_{—}5, MO_HL_{—}12, MO_HL_{—}7, MO_HL_{—}11 and MO_HL_{—}8 from Table 1 are absent in said sample, or;
at least one gene from each of the bacterial species MO_HL_{—}12, MO_HL_{—}11, MO_HL_{—}2, MO_HL_{—}5, MO_HL_{—}8, MO_HL_{—}13 and MO_HL_{—}7 from Table 1 are absent in said sample, or;
at least one gene from each of the bacterial species MO_HL_{—}12, MO_HL_{—}2, MO_HL_{—}17, MO_HL_{—}11, MO_HL_{—}13, MO_HL_{—}5, MO_HL_{—}8 and MO_HL_{—}7 from Table 1 are absent in said sample, or;
at least one gene from each of the bacterial species MO_HL_{—}4, MO_HL_{—}11, MO_HL_{—}6, MO_HL_{—}13, MO_HL_{—}2, MO_HL_{—}8, MO_HL_{—}12, MO_HL_{—}7 and MO_HL_{—}17 from Table 1 are absent in said sample, or;
at least one gene from each of the bacterial species MO_HL_{—}8, MO_HL_{—}11, MO_HL_{—}6, MO_HL_{—}4, MO_HL_{—}13, MO_HL_{—}5, MO_HL_{—}2, MO_HL_{—}7, MO_HL_{—}17 and MO_HL_{—}12 from Table 1 are absent in said sample;
at least one gene from each of the bacterial species MO_HL_{—}5, MO_HL_{—}13, MO_HL_{—}4, MO_HL_{—}12, MO_HL_{—}15, MO_HL_{—}17, MO_HL_{—}6, MO_HL_{—}2, MO_HL_{—}8, MO_HL_{—}7 and MO_HL_{—}11 from Table 1 are absent in said sample;
at least one gene from each of the bacterial species MO_HL_{—}11, MO_HL_{—}6, MO_HL_{—}17, MO_HL_{—}4, MO_HL_{—}3, MO_HL_{—}12, MO_HL_{—}5, MO_HL_{—}10, MO_HL_{—}8, MO_HL_{—}7, MO_HL_{—}2 and MO_HL_{—}13 from Table 1 are absent, in said sample;
at least one gene from each of the bacterial species MO_HL_{—}18, MO_HL_{—}15, MO_HL_{—}11, MO_HL_{—}10, MO_HL_{—}5, MO_HL_{—}4, MO_HL_{—}6, MO_HL_{—}8, MO_HL_{—}12, MO_HL_{—}7, MO_HL_{—}2, MO_HL_{—}13 and MO_HL_{—}3 from Table 1 are absent in said sample, or;
at least one gene from each of the bacterial species MO_HL_{—}6, MO_HL_{—}17, MO_HL_{—}3, MO_HL_{—}2, MO_HL_{—}4, MO_HL_{—}18, MO_HL_{—}5, MO_HL_{—}13, MO_HL_{—}10, MO_HL_{—}15, MO_HL_{—}7, MO_HL_{—}1, MO_HL_{—}8 and MO_HL_{—}12 from Table 1 are absent in said sample, or;
at least one gene from each of the bacterial species MO_HL_{—}10, MO_HL_{—}18, MO_HL_{—}2, MO_HL_{—}13, MO_HL_{—}7, MO_HL_{—}1, MO_HL_{—}11, MO_HL_{—}3, MO_HL_{—}4, MO_HL_{—}15, MO_HL_{—}5, MO_HL_{—}6, MO_HL_{—}17, MO_HL_{—}12 and MO_HL_{—}8 from Table 1 are absent, in said sample;
at least one gene from each of the bacterial species MO_HL_{—}7, MO_HL_{—}4, MO_HL_{—}13, MO_HL_{—}1, MO_HL_{—}5, MO_HL_{—}6, MO_HL_{—}11, MO_HL_{—}12, MO_HL_{—}8, MO_HL_{—}3, MO_HL_{—}18, MO_HL_{—}2, MO_HL_{—}10, MO_HL_{—}17, MO_HL_{—}15 and MO_HL_{—}9 from Table 1 are absent in said sample, or;
at least one gene from each of the bacterial species MO_HL_{—}10, MO_HL_{—}8, MO_HL_{—}1, MO_HL_{—}16, MO_HL_{—}18, MO_HL_{—}5, MO_HL_{—}15, MO_HL_{—}2, MO_HL_{—}7, MO_HL_{—}6, MO_HL_{—}13, MO_HL_{—}11, MO_HL_{—}17, MO_HL_{—}3, MO_HL_{—}14, MO_HL_{—}4 and MO_HL_{—}12 from Table 1 are absent, in said sample;
at least one gene from each of the bacterial species MO_HL_{—}15, MO_HL_{—}17, MO_HL_{—}4, MO_HL_{—}14, MO_HL_{—}16, MO_HL_{—}10, MO_HL_{—}7, MO_HL_{—}6, MO_HL_{—}11, MO_HL_{—}9, MO_HL_{—}5, MO_HL_{—}3, MO_HL_{—}8, MO_HL_{—}1, MO_HL_{—}12, MO_HL_{—}18, MO_HL_{—}13 and MO_HL_{—}2 from Table 1 are absent, in said sample.

6. A method according to any of claims 1 to 5, characterized in that it comprises detecting the number of copies of at least one bacterial gene from said bacterial species in the sample.

7. A method according to claim 6, characterized in that it comprises detecting the number of copies of at least 10, 15, 20 or at least 25 bacterial genes from said bacterial species in the sample.

8. A method according to any of claim 6 or 7, characterized in that said bacterial genes are chosen in the list consisting of sequence SEQID 1 to sequence SEQ ID 450.

9. A method according to any of claims 1 to 8, characterized in that the presence or absence of the bacterial genes according to the invention is detected by the use of a nucleic microarray.

10. A method according to claim 9, characterized in that the nucleic microarray is an oligonucleotide microarray comprising at least one oligonucleotide specific for at least one gene having a sequence selected from SEQ ID NOs 1-450.

11. Method for determining if an overweight subject is at risk to develop obesity related co-morbidities, said method comprising the steps of:
c) determining that said subject has a reduced gut bacterial diversity with a method according to anyone of claims 1 to 10;
d) if said subject has a reduced gut bacterial diversity, determining that said overweight subject is at is at risk to develop obesity related co-morbidities.

12. A method for determining if an overweight subject is in need of a diet, said method comprising the steps of:
a) determining that said subject has a reduced gut bacterial diversity with a method according to anyone of claims 1 to 10;
b) if said subject has a reduced gut bacterial diversity, determining that said subject is in need of a diet.

13. A method for alleviating the risks to develop obesity-related co-morbidities, said method comprising the steps of:
a) determining that said subject has a reduced gut bacterial diversity with a method according to anyone of claims 1 to 10;
b) if said subject has a reduced gut bacterial diversity, determining that said subject is in need of a diet.

14. A method for determining if an overweight subject is in need of a low-grade inflammation treatment, preferably in addition to the implementation of a diet, comprising the steps of:
a) determining that said subject has a reduced gut bacterial diversity with a method according to anyone of claims 1 to 10;
b) if said subject has a reduced gut bacterial diversity, determining that said subject is in need of a low-grade inflammation treatment, preferably in addition to the implementation of a diet.

15. A method for monitoring the efficiency of a diet in increasing gut bacterial microbiome richness in an overweight subject in need thereof, said method comprising the steps of:
a) determining that said subject has a reduced gut bacterial diversity with a method according to anyone of claims 1 to 10;
b) implementing said diet;
c) determining from a second gut microbial DNA sample obtained from said subject if said subject has a reduced gut bacterial diversity with a method according to anyone of claims 1 to 10;
d) if said subject has a reduced gut bacterial diversity, determining that the diet is efficient in increasing gut bacterial microbiome richness in said subject.
